(19) United States
(12) Patent Application Publication
(10) Pub. No.: US 2023/0416765 A1
(43) Pub. Date: Dec. 28, 2023

(54) AGROBACTERIUM RHIZOGENES AND METHODS OF TRANSFORMING CELLS

(71) Applicant: Pairwise Plants Services, Inc, Durham, NC (US)

(72) Inventors: Fang-Ming Lai, Cary, NC (US); Eric Dean, Raleigh, NC (US); Ming Cheng, Cary, NC (US); Joel Reiner, Raleigh, NC (US); Qingchun Shi, Cary, NC (US); David Schwark, New Hill, NC (US); Sharon Leigh Guffy, Durham, NC (US); Aaron Hummel, Hillsborough, NC (US)

(21) Appl. No.: 18/253,494

(22) PCT Filed: Nov. 23, 2021
(86) PCT No.: PCT/US2021/060480

§ 371 Date: May 18, 2023

Related U.S. Application Data
(60) Provisional application No. 63/117,173, filed on Nov. 23, 2020.

(51) Int. Cl. C12N 15/82

(52) U.S. Cl. CPC C12N 15/8205

(57) ABSTRACT

Agrobacterium rhizogenes are described herein along with methods of transforming cells and methods of using Agrobacterium rhizogenes and/or transformed cells. Also described herein are plants, such as plants in the Rubus family, including a modified nucleic acid, optionally wherein the plants are transgene-free and include a modified nucleic acid.

### STATEMENT REGARDING ELECTRONIC FILING OF A SEQUENCE LISTING

[0001] A Sequence Listing in ASCII text format, submitted under 37 C.F.R. § 1.821, entitled 1499-54WO_ST25, 1,184,886 bytes in size, generated on Nov. 21, 2021, and filed via EFS-Web, is provided in lieu of a paper copy. This Sequence Listing is hereby incorporated herein by reference into the specification for its disclosures.

### FIELD

[0002] This invention relates to Agrobacterium rhizogenes, to methods of transforming cells, and to methods of use of Agrobacterium rhizogenes and/or transformed cells. The invention further relates to plants, such as plants in the Rubus family, including a modified nucleic acid, optionally transgene-free plants including a modified nucleic acid.

### BACKGROUND

[0003] Successful genetic transformation in plant species depends on delivering T-DNA into regeneration-competent cells and the subsequent regeneration of a plantlet from those transgenic cells. Various Agrobacterium rhizogenes strains have been used for producing transgenic roots and full transgenic plants via transgenic roots (Tepfer, D., Physiol Plant 79: 140-146, 1990). For example, successful regeneration of full transgenic plants from transgenic hairy roots was reported in Centarurium erythraea (Subotic et al. Biol Plant 47(4): 617-619, 2003). Infection by wild-type Agrobacterium rhizogenes and subsequent formation of abnormal roots (hairy roots) was reported in Vitis and Rubus (Hemstad, P. R. and Reisch, B. I., J. Plant Physiol. 120(1): 9-17 (1985). However, there are no reports or disclosures on generating transgenic roots carrying T-DNA from the tumor inducing (Ti) plasmid and full transgenic plants from transgenic roots in Rubus.

[0004] There are reports on generating composite plants which contain transgenic roots and wild-type aerial parts using Agrobacterium rhizogenes, for example, in peanut (Geng et al., Plant Cell Tiss Organ Cult 109: 491-500, 2012) and peach (Xu et al., Scientific Reports 10: 2836, 2020). The composite plants in these reports were used for genetic studies of roots and gene functionality, but offspring were not able to inherit the transgene.

[0005] Agrobacterium rhizogenes strains applied to plant genetic transformation contain the hairy root inducing genes (e.g., rol genes) and may lead to hairy root phenotypes such as short internodes, wrinkled leaves, abundant roots with extensive lateral branching, and increased production of certain metabolites (Tepfer Cell 47: 957-967 (1984) and Shen et al. Proc. Natl. Acad. Sci. USA 85, 3417-3421; 1988). A. rhizogenes strains can be disarmed by removing the T-DNA from its Ri plasmid while maintaining the trans factors including the vir genes (Vilaine, F. and Casse-Debart, F. Mol Gen Genet 206: 17-23, 1987 and Mankin, S., et al., In Vitro Cell Dev Biol 43: 521-535, 2007). A disarmed K599 strain of A. rhizogenes can deliver the T-DNA of its Ti plasmid efficiently and produces phenotypically normal transgenic soybean plants (Mankin et al. 2007). However, there are no reports on using a disarmed Agrobacterium rhizogenes strain in Rubus transformation.

[0006] To date, an efficient and genotype-independent genetic transformation system has not yet been developed for Rubus. Although successful regeneration of transformants has been reported, these reported processes are highly genotype dependent and are mainly limited by a high level of recalcitrance for regeneration that exists within the genus. Existing reports have generally followed conventional transformation and regeneration approaches in vitro, namely, shoot induction from the explants, shoot development and then the root induction, and these transformation processes require a lengthy duration in obtaining transgenic plantlets in vitro. For example, generation of transgenic Rubus plants has historically proven to be a difficult and time-consuming process. A duration of six months to eight months is commonly needed to generate transgenic plants in the Rubus plants. Accordingly, new transformation protocols are needed.

### SUMMARY OF EXAMPLE EMBODIMENTS

[0007] One aspect of the present invention is directed to a method of transforming a plant cell, the method comprising: introducing a polynucleotide from an Agrobacterium rhizogenes strain into the plant cell to provide a transformed plant cell, thereby transforming the plant cell. In some embodiments, the transformed plant cell is a transgenic plant cell.

[0008] Another aspect of the present invention is directed to a method of producing an edited plant, the method comprising: introducing a polynucleotide from an Agrobacterium rhizogenes strain into a plant cell of an explant to provide an edited cell, wherein the polynucleotide encodes or comprises at least a portion of an editing system that is capable of modifying a target nucleic acid in the plant cell to provide a modified nucleic acid and thereby the edited cell; producing a root from the edited cell; and producing an edited plant from the root.

[0009] A further aspect of the present invention is directed to a method of transforming a plant cell, the method comprising: introducing a polynucleotide from a disarmed Agrobacterium rhizogenes strain MSU440 into the plant cell to provide a transformed plant cell, thereby transforming the plant cell. In some embodiments, the transformed plant cell is a transgenic plant cell.

[0010] Another aspect of the present invention is directed to a method for evaluating transgene function in a plant cell, the method comprising: introducing a polynucleotide from an Agrobacterium rhizogenes strain into the plant cell to provide a transformed plant cell comprising the transgene; and evaluating the transformed plant cell to determine transgene function. In some embodiments, the transformed plant cell is a transgenic plant cell.

[0011] An additional aspect of the present invention is directed to a disarmed Agrobacterium rhizogenes strain as described herein and/or a composition comprising a disarmed Agrobacterium rhizogenes strain as described herein.

[0012] The present invention further provides expression cassettes and/or vectors comprising a nucleic acid construct of the present invention, and provides cells comprising a polypeptide and/or nucleic acid construct of the present invention. Additionally, the present invention provides kits comprising a nucleic acid construct and/or polypeptide of the present invention and expression cassettes, vectors and/or cells comprising the same.

[0013] It is noted that aspects of the present invention described with respect to one embodiment, may be incorporated in a different embodiment although not specifically described relative thereto. That is, all embodiments and/or features of any embodiment can be combined in any way and/or combination. Applicant reserves the right to change any originally filed claim and/or file any new claim accordingly, including the right to be able to amend any originally filed claim to depend from and/or incorporate any feature of any other claim or claims although not originally claimed in that manner. These and other objects and/or aspects of the present invention are explained in detail in the specification set forth below. Further features, advantages and details of the present invention will be appreciated by those of ordinary skill in the art from a reading of the figures and the detailed description of the preferred embodiments that follow, such description being merely illustrative of the present invention.

### BRIEF DESCRIPTION OF THE DRAWINGS

[0014] FIG. 1 is a schematic illustration of an Agrobacterium rhizogenes MSU440 T-DNA knockout cassette according to embodiments of the present invention. “Prom” is the antibiotic resistance gene promoter that is followed by an antibiotic resistance gene (e.g., tetracycline or gentamicin) (“Antibiotic Resistance CDS”), and then a terminator (“Term”). “FRT” depicts FRT recombination sites for post-knockout cassette removal by yeast FLP recombinase. “Homologous Sequence” depicts a sequence homologous to the 5′ and 3′ ends of the T-DNAs in Ri plasmid pRIA4, and “RS” depicts the unique restriction sites for rapid cloning of homologous sequences.

[0015] FIG. 2 is schematic illustration showing a suicide vector and SacB counter-selection strategy according to embodiments of the present invention.

[0016] FIG. 3 depicts the Ri plasmid of Agrobacterium rhizogenes MSU440, which includes two T-DNAs that are labeled TL-DNA and TR-DNA. Arrows point to a sequence upstream of TL-DNA and a sequence downstream of TR-DNA, which were used as homologous recombination arm sequences in the knockout cassette.

[0017] FIG. 4 depicts the Ri plasmid of Agrobacterium rhizogenes strain DS101.1.

[0018] FIG. 5 shows the alignment of the Ri plasmid from MSU440 and the Ri plasmid from DS101.1. The alignment shows that in DS101.1, both T-DNAs and the intervening sequence are absent.

### DETAILED DESCRIPTION

[0019] The present invention now will be described hereinafter with reference to the accompanying drawings and examples, in which embodiments of the invention are shown. This description is not intended to be a detailed catalog of all the different ways in which the invention may be implemented, or all the features that may be added to the instant invention. For example, features illustrated with respect to one embodiment may be incorporated into other embodiments, and features illustrated with respect to a particular embodiment may be deleted from that embodiment. Thus, the invention contemplates that in some embodiments of the invention, any feature or combination of features set forth herein can be excluded or omitted. In addition, numerous variations and additions to the various embodiments suggested herein will be apparent to those skilled in the art in light of the instant disclosure, which do not depart from the instant invention. Hence, the following descriptions are intended to illustrate some particular embodiments of the invention, and not to exhaustively specify all permutations, combinations and variations thereof.

[0020] Unless otherwise defined, all technical and scientific terms used herein have the same meaning as commonly understood by one of ordinary skill in the art to which this invention belongs. The terminology used in the description of the invention herein is for the purpose of describing particular embodiments only and is not intended to be limiting of the invention.

[0021] All publications, patent applications, patents and other references cited herein are incorporated by reference in their entireties for the teachings relevant to the sentence and/or paragraph in which the reference is presented.

[0022] Unless the context indicates otherwise, it is specifically intended that the various features of the invention described herein can be used in any combination. Moreover, the present invention also contemplates that in some embodiments of the invention, any feature or combination of features set forth herein can be excluded or omitted. To illustrate, if the specification states that a composition comprises components A, B and C, it is specifically intended that any of A, B or C, or a combination thereof, can be omitted and disclaimed singularly or in any combination.

[0023] As used in the description of the invention and the appended claims, the singular forms “a,” “an” and “the” are intended to include the plural forms as well, unless the context clearly indicates otherwise.

[0024] Also as used herein, “and/or” refers to and encompasses any and all possible combinations of one or more of the associated listed items, as well as the lack of combinations when interpreted in the alternative (“or”).

[0025] The term “about,” as used herein when referring to a measurable value such as an amount or concentration and the like, is meant to encompass variations of ±10%, ±5%, ±1%, ±0.5%, or even ±0.1% of the specified value as well as the specified value. For example, “about X” where X is the measurable value, is meant to include X as well as variations of ±10%, ±5%, ±1%, ±0.5%, or even ±0.1% of X. A range provided herein for a measurable value may include any other range and/or individual value therein.

[0026] As used herein, phrases such as “between X and Y” and “between about X and Y” should be interpreted to include X and Y. As used herein, phrases such as “between about X and Y” mean “between about X and about Y” and phrases such as “from about X to Y” mean “from about X to about Y.”

[0027] Recitation of ranges of values herein are merely intended to serve as a shorthand method of referring individually to each separate value falling within the range, unless otherwise indicated herein, and each separate value is incorporated into the specification as if it were individually recited herein. For example, if the range 10 to 15 is disclosed, then 11, 12, 13, and 14 are also disclosed.

[0028] The term “comprise,” “comprises” and “comprising” as used herein, specify the presence of the stated features, integers, steps, operations, elements, and/or components, but do not preclude the presence or addition of one or more other features, integers, steps, operations, elements, components, and/or groups thereof.

[0029] As used herein, the transitional phrase “consisting essentially of” means that the scope of a claim is to be interpreted to encompass the specified materials or steps recited in the claim and those that do not materially affect the basic and novel characteristic(s) of the claimed invention. Thus, the term “consisting essentially of” when used in a claim of this invention is not intended to be interpreted to be equivalent to “comprising.”

[0030] As used herein, the terms “increase,” “increasing,” “enhance,” “enhancing,” “improve” and “improving” (and grammatical variations thereof) describe an elevation of at least about 5%, 10%, 15%, 20%, 25%, 30%, 35%, 40%, 45%, 50%, 55%, 60%, 65%, 70%, 75%, 80%, 85%, 90%, 95%, 100%, 150%, 200%, 300%, 400%, 500% or more such as compared to another measurable property or quantity (e.g., a control value).

[0031] As used herein, the terms “reduce,” “reduced,” “reducing,” “reduction,” “diminish,” and “decrease” (and grammatical variations thereof), describe, for example, a decrease of at least about 5%, 10%, 15%, 20%, 25%, 30%, 35%, 40%, 45%, 50%, 55%, 60%, 65%, 70%, 75%, 80%, 85%, 90%, 95%, 97%, 98%, 99%, or 100% such as compared to another measurable property or quantity (e.g., a control value). In some embodiments, the reduction can result in no or essentially no (i.e., an insignificant amount, e.g., less than about 10% or even 5%) detectable activity or amount.

[0032] A “heterologous” or a “recombinant” nucleotide sequence is a nucleotide sequence not naturally associated with a host cell into which it is introduced, including non-naturally occurring multiple copies of a naturally occurring nucleotide sequence.

[0033] A “native” or “wild-type” nucleic acid, nucleotide sequence, polypeptide or amino acid sequence refers to a naturally occurring or endogenous nucleic acid, nucleotide sequence, polypeptide or amino acid sequence. Thus, for example, a “wild-type mRNA” is an mRNA that is naturally occurring in or endogenous to the reference organism. A “homologous” nucleic acid sequence is a nucleotide sequence naturally associated with a host cell into which it is introduced.

[0034] As used herein, the terms “nucleic acid,” “nucleic acid molecule,” “nucleotide sequence” and “polynucleotide” refer to RNA or DNA that is linear or branched, single or double stranded, or a hybrid thereof. The term also encompasses RNA/DNA hybrids. When dsRNA is produced synthetically, less common bases, such as inosine, 5-methylcytosine, 6-methyladenine, hypoxanthine and others can also be used for antisense, dsRNA, and ribozyme pairing. For example, polynucleotides that contain C-5 propyne analogues of uridine and cytidine have been shown to bind RNA with high affinity and to be potent antisense inhibitors of gene expression. Other modifications, such as modification to the phosphodiester backbone, or the 2′-hydroxy in the ribose sugar group of the RNA can also be made.

[0035] As used herein, the term “nucleotide sequence” refers to a heteropolymer of nucleotides or the sequence of these nucleotides from the 5′ to 3′ end of a nucleic acid molecule and includes DNA or RNA molecules, including cDNA, a DNA fragment or portion, genomic DNA, synthetic (e.g., chemically synthesized) DNA, plasmid DNA, mRNA, and anti-sense RNA, any of which can be single stranded or double stranded. The terms “nucleotide sequence” “nucleic acid,” “nucleic acid molecule,” “nucleic acid construct,” “recombinant nucleic acid,” “oligonucleotide” and “polynucleotide” are also used interchangeably herein to refer to a heteropolymer of nucleotides. Nucleic acid molecules and/or nucleotide sequences provided herein are presented herein in the 5′ to 3′ direction, from left to right and are represented using the standard code for representing the nucleotide characters as set forth in the U.S. sequence rules, 37 CFR §§ 1.821-1.825 and the World Intellectual Property Organization (WIPO) Standard ST.25. A “5′ region” as used herein can mean the region of a polynucleotide that is nearest the 5′ end of the polynucleotide. Thus, for example, an element in the 5′ region of a polynucleotide can be located anywhere from the first nucleotide located at the 5′ end of the polynucleotide to the nucleotide located halfway through the polynucleotide. A “3′ region” as used herein can mean the region of a polynucleotide that is nearest the 3′ end of the polynucleotide. Thus, for example, an element in the 3′ region of a polynucleotide can be located anywhere from the first nucleotide located at the 3′ end of the polynucleotide to the nucleotide located halfway through the polynucleotide.

[0036] As used herein, the term “gene” refers to a nucleic acid molecule capable of being used to produce mRNA, antisense RNA, miRNA, anti-microRNA antisense oligodeoxyribonucleotide (AMO) and the like. Genes may or may not be capable of being used to produce a functional protein or gene product. Genes can include both coding and non-coding regions (e.g., introns, regulatory elements, promoters, enhancers, termination sequences and/or 5′ and 3′ untranslated regions). A gene may be “isolated” by which is meant a nucleic acid that is substantially or essentially free from components normally found in association with the nucleic acid in its natural state. Such components include other cellular material, culture medium from recombinant production, and/or various chemicals used in chemically synthesizing the nucleic acid.

[0037] The term “mutation” refers to point mutations (e.g., missense, or nonsense, or insertions or deletions of single base pairs that result in frame shifts), insertions, deletions, and/or truncations. When the mutation is a substitution of a residue within an amino acid sequence with another residue, or a deletion or insertion of one or more residues within a sequence, the mutations are typically described by identifying the original residue followed by the position of the residue within the sequence and by the identity of the newly substituted residue.

[0038] The terms “complementary” or “complementarity,” as used herein, refer to the natural binding of polynucleotides under permissive salt and temperature conditions by base-pairing. For example, the sequence “A-G-T” (5′ to 3′) binds to the complementary sequence “T-C-A” (3′ to 5′). Complementarity between two single-stranded molecules may be “partial,” in which only some of the nucleotides bind, or it may be complete when total complementarity exists between the single stranded molecules. The degree of complementarity between nucleic acid strands has significant effects on the efficiency and strength of hybridization between nucleic acid strands.

[0039] “Complement” as used herein can mean 100% complementarity with the comparator nucleotide sequence or it can mean less than 100% complementarity (e.g., “substantially complementary,” such as about 70%, 71%, 72%, 73%, 74%, 75%, 76%, 77%, 78%, 79%, 80%, 81%, 82%, 83%, 84%, 85%, 86%, 87%, 88%, 89%, 90%, 91%, 92%, 93%, 94%, 95%, 96%, 97%, 98%, 99%, and the like, complementarity).

[0040] A “portion” or “fragment” of a nucleotide sequence or polypeptide sequence will be understood to mean a nucleotide or polypeptide sequence of reduced length (e.g., reduced by 1, 2, 3, 4, 5, 6, 7, 8, 9, 10, 11, 12, 13, 14, 15, 16, 17, 18, 19, 20 or more residue(s) (e.g., nucleotide(s) or peptide(s)) relative to a reference nucleotide or polypeptide sequence, respectively, and comprising, consisting essentially of and/or consisting of a nucleotide or polypeptide sequence of contiguous residues, respectively, identical or almost identical (e.g., 70%, 71%, 72%, 73%, 74%, 75%, 76%, 77%, 78%, 79%, 80%, 81%, 82%, 83%, 84%, 85%, 86%, 87%, 88%, 89%, 90%, 91%, 92%, 93%, 94%, 95%, 96%, 97%, 98%, 99% identical) to the reference nucleotide or polypeptide sequence. Such a nucleic acid fragment or portion according to the invention may be, where appropriate, included in a larger polynucleotide of which it is a constituent. As an example, a repeat sequence of guide nucleic acid of this invention may comprise a portion of a wild-type CRISPR-Cas repeat sequence (e.g., a wild-type Type V CRISPR Cas repeat, e.g., a repeat from the CRISPR Cas system that includes, but is not limited to, Cas12a (Cpf1), Cas12b, Cas12c (C2c3), Cas12d (CasY), Cas12e (CasX), Cas12g, Cas12h, Cas12i, C2c1, C2c4, C2c5, C2c8, C2c9, C2c10, Cas14a, Cas14b, and/or Cas14c, and the like).

[0041] Different nucleic acids or proteins having homology are referred to herein as “homologues.” The term homologue includes homologous sequences from the same and other species and orthologous sequences from the same and other species. “Homology” refers to the level of similarity between two or more nucleic acid and/or amino acid sequences in terms of percent of positional identity (i.e., sequence similarity or identity). Homology also refers to the concept of similar functional properties among different nucleic acids or proteins. Thus, the compositions and methods of the invention further comprise homologues to the nucleotide sequences and polypeptide sequences of this invention. “Orthologous,” as used herein, refers to homologous nucleotide sequences and/or amino acid sequences in different species that arose from a common ancestral gene during speciation. A homologue of a nucleotide sequence of this invention has a substantial sequence identity (e.g., at least about 70%, 71%, 72%, 73%, 74%, 75%, 76%, 77%, 78%, 79%, 80%, 81%, 82%, 83%, 84%, 85%, 86%, 87%, 88%, 89%, 90%, 91%, 92%, 93%, 94%, 95%, 96%, 97%, 98%, 99%, 99.5% or 100%) to said nucleotide sequence of the invention.

[0042] As used herein “sequence identity” refers to the extent to which two optimally aligned polynucleotide or polypeptide sequences are invariant throughout a window of alignment of components, e.g., nucleotides or amino acids. “Identity” can be readily calculated by known methods including, but not limited to, those described in: Computational Molecular Biology (Lesk, A. M., ed.) Oxford University Press, New York (1988); Biocomputing: Informatics and Genome Projects (Smith, D. W., ed.) Academic Press, New York (1993); Computer Analysis ofSequence Data, Part I (Griffin, A. M., and Griffin, H. G., eds.) Humana Press, New Jersey (1994); Sequence Analysis in Molecular Biology (von Heinje, G., ed.) Academic Press (1987); and Sequence Analysis Primer (Gribskov, M. and Devereux, J., eds.) Stockton Press, New York (1991).

[0043] As used herein, the term “percent sequence identity” or “percent identity” refers to the percentage of identical nucleotides in a linear polynucleotide sequence of a reference (“query”) polynucleotide molecule (or its complementary strand) as compared to a test (“subject”) polynucleotide molecule (or its complementary strand) when the two sequences are optimally aligned. In some embodiments, “percent identity” can refer to the percentage of identical amino acids in an amino acid sequence as compared to a reference polypeptide.

[0044] As used herein, the phrase “substantially identical,” or “substantial identity” in the context of two nucleic acid molecules, nucleotide sequences or protein sequences, refers to two or more sequences or subsequences that have at least about 70%, 71%, 72%, 73%, 74%, 75%, 76%, 77%, 78%, 79%, 80%, 81%, 82%, 83%, 84%, 85%, 86%, 87%, 88%, 89%, 90%, 9100, 92%, 93%, 94%, 95%, 96%, 97%, 98%, 99%, 99.5% or 100% nucleotide or amino acid residue identity, when compared and aligned for maximum correspondence, as measured using one of the following sequence comparison algorithms or by visual inspection. In some embodiments of the invention, the substantial identity exists over a region of consecutive nucleotides of a nucleotide sequence of the invention that is about 10 nucleotides to about 20 nucleotides, about 10 nucleotides to about 25 nucleotides, about 10 nucleotides to about 30 nucleotides, about 15 nucleotides to about 25 nucleotides, about 30 nucleotides to about 40 nucleotides, about 50 nucleotides to about 60 nucleotides, about 70 nucleotides to about 80 nucleotides, about 90 nucleotides to about 100 nucleotides, or more nucleotides in length, and any range therein, up to the full length of the sequence. In some embodiments, the nucleotide sequences can be substantially identical over at least about 20 nucleotides (e.g., about 20, 21, 22, 23, 24, 25, 26, 27, 28, 29, 30, 31, 32, 33, 34, 35, 36, 37, 38, 39, 40 nucleotides). In some embodiments, a substantially identical nucleotide or protein sequence performs substantially the same function as the nucleotide (or encoded protein sequence) to which it is substantially identical.

[0045] For sequence comparison, typically one sequence acts as a reference sequence to which test sequences are compared. When using a sequence comparison algorithm, test and reference sequences are entered into a computer, subsequence coordinates are designated if necessary, and sequence algorithm program parameters are designated. The sequence comparison algorithm then calculates the percent sequence identity for the test sequence(s) relative to the reference sequence, based on the designated program parameters.

[0046] Optimal alignment of sequences for aligning a comparison window are well known to those skilled in the art and may be conducted by tools such as the local homology algorithm of Smith and Waterman, the homology alignment algorithm of Needleman and Wunsch, the search for similarity method of Pearson and Lipman, and optionally by computerized implementations of these algorithms such as GAP, BESTFIT, FASTA, and TFASTA available as part of the GCG® Wisconsin Package® (Accelrys Inc., San Diego, CA). An “identity fraction” for aligned segments of a test sequence and a reference sequence is the number of identical components which are shared by the two aligned sequences divided by the total number of components in the reference sequence segment, e.g., the entire reference sequence or a smaller defined part of the reference sequence. Percent sequence identity is represented as the identity fraction multiplied by 100. The comparison of one or more polynucleotide sequences may be to a full-length polynucleotide sequence or a portion thereof, or to a longer polynucleotide sequence. For purposes of this invention “percent identity” may also be determined using BLASTX version 2.0 for translated nucleotide sequences and BLASTN version 2.0 for polynucleotide sequences.

[0047] Two nucleotide sequences may also be considered substantially complementary when the two sequences hybridize to each other under stringent conditions. In some representative embodiments, two nucleotide sequences considered to be substantially complementary hybridize to each other under highly stringent conditions.

[0048] “Stringent hybridization conditions” and “stringent hybridization wash conditions” in the context of nucleic acid hybridization experiments such as Southern and Northern hybridizations are sequence dependent, and are different under different environmental parameters. An extensive guide to the hybridization of nucleic acids is found in Tijssen Laboratory Techniques in Biochemistry and Molecular Biology-Hybridization with Nucleic Acid Probes part I chapter 2 “Overview of principles of hybridization and the strategy of nucleic acid probe assays” Elsevier, New York (1993). Generally, highly stringent hybridization and wash conditions are selected to be about 5° C. lower than the thermal melting point (Tₘ) for the specific sequence at a defined ionic strength and pH.

[0049] The Tₘ is the temperature (under defined ionic strength and pH) at which 50% of the target sequence hybridizes to a perfectly matched probe. Very stringent conditions are selected to be equal to the Tₘ for a particular probe. An example of stringent hybridization conditions for hybridization of complementary nucleotide sequences which have more than 100 complementary residues on a filter in a Southern or northern blot is 50% formamide with 1 mg of heparin at 42° C., with the hybridization being carried out overnight. An example of highly stringent wash conditions is 0.1 5M NaCl at 72° C. for about 15 minutes. An example of stringent wash conditions is a 0.2×SSC wash at 65° C. for 15 minutes (see, Sambrook, infra, for a description of SSC buffer). Often, a high stringency wash is preceded by a low stringency wash to remove background probe signal. An example of a medium stringency wash for a duplex of, e.g., more than 100 nucleotides, is 1×SSC at 45° C. for 15 minutes. An example of a low stringency wash for a duplex of, e.g., more than 100 nucleotides, is 4×-6×SSC at 40° C. for 15 minutes. For short probes (e.g., about 10 to 50 nucleotides), stringent conditions typically involve salt concentrations of less than about 1.0 M Na ion, typically about 0.01 to 1.0 M Na ion concentration (or other salts) at pH 7.0 to 8.3, and the temperature is typically at least about 30° C. Stringent conditions can also be achieved with the addition of destabilizing agents such as formamide. In general, a signal to noise ratio of 2× (or higher) than that observed for an unrelated probe in the particular hybridization assay indicates detection of a specific hybridization. Nucleotide sequences that do not hybridize to each other under stringent conditions are still substantially identical if the proteins that they encode are substantially identical. This can occur, for example, when a copy of a nucleotide sequence is created using the maximum codon degeneracy permitted by the genetic code.

[0050] A polynucleotide and/or recombinant nucleic acid construct of this invention can be codon optimized for expression. In some embodiments, a polynucleotide, nucleic acid construct, expression cassette, and/or vector of the present invention (e.g., that comprises/encodes a nucleic acid binding polypeptide (e.g., a DNA binding domain such as a nucleic acid binding polypeptide from a polynucleotide-guided endonuclease, a zinc finger nuclease, a transcription activator-like effector nuclease (TALEN), an Argonaute protein, and/or a CRISPR-Cas effector protein), a guide nucleic acid, a cytosine deaminase and/or adenine deaminase) may be codon optimized for expression in an organism (e.g., an animal, a plant, a fungus, an archaeon, or a bacterium). In some embodiments, the codon optimized nucleic acid constructs, polynucleotides, expression cassettes, and/or vectors of the invention have about 70% to about 99.9% (e.g., 70%, 71%, 72%, 73%, 74%, 75%, 76%, 77%, 78%, 79%, 80%, 81%, 82%, 83%, 84%, 85%, 86%, 87%, 88%, 89%, 90%, 91%, 92%, 93%, 94%, 95%, 96%, 97%, 98%, 99%, 99.5%. 99.9% or 100%) identity or more to the reference nucleic acid constructs, polynucleotides, expression cassettes, and/or vectors that have not been codon optimized.

[0051] In any of the embodiments described herein, a polynucleotide or nucleic acid construct of the invention may be operatively associated with a variety of promoters and/or other regulatory elements for expression in an organism or cell thereof (e.g., a plant and/or a cell of a plant). Thus, in some embodiments, a polynucleotide or nucleic acid construct of this invention may further comprise one or more promoters, introns, enhancers, and/or terminators operably linked to one or more nucleotide sequences. In some embodiments, a promoter may be operably associated with an intron (e.g., Ubi1 promoter and intron). In some embodiments, a promoter associated with an intron maybe referred to as a “promoter region” (e.g., Ubi1 promoter and intron).

[0052] By “operably linked” or “operably associated” as used herein in reference to polynucleotides, it is meant that the indicated elements are functionally related to each other, and are also generally physically related. Thus, the term “operably linked” or “operably associated” as used herein, refers to nucleotide sequences on a single nucleic acid molecule that are functionally associated. Thus, a first nucleotide sequence that is operably linked to a second nucleotide sequence means a situation when the first nucleotide sequence is placed in a functional relationship with the second nucleotide sequence. For instance, a promoter is operably associated with a nucleotide sequence if the promoter effects the transcription or expression of said nucleotide sequence. Those skilled in the art will appreciate that the control sequences (e.g., promoter) need not be contiguous with the nucleotide sequence to which it is operably associated, as long as the control sequences function to direct the expression thereof. Thus, for example, intervening untranslated, yet transcribed, nucleic acid sequences can be present between a promoter and the nucleotide sequence, and the promoter can still be considered “operably linked” to the nucleotide sequence.

[0053] As used herein, the term “linked,” or “fused” in reference to polypeptides, refers to the attachment of one polypeptide to another. A polypeptide may be linked or fused to another polypeptide (at the N-terminus or the C-terminus) directly (e.g., via a peptide bond) or through a linker (e.g., a peptide linker).

[0054] The term “linker” in reference to polypeptides is art-recognized and refers to a chemical group, or a molecule linking two molecules or moieties, e.g., two domains of a fusion protein, such as, for example, a CRISPR-Cas effector protein and a peptide tag and/or a polypeptide of interest. A linker may be comprised of a single linking molecule (e.g., a single amino acid) or may comprise more than one linking molecule. In some embodiments, the linker can be an organic molecule, group, polymer, or chemical moiety such as a bivalent organic moiety. In some embodiments, the linker may be an amino acid or it may be a peptide. In some embodiments, the linker is a peptide.

[0055] In some embodiments, a peptide linker useful with this invention may be about 2 to about 100 or more amino acids in length, for example, about 2, 3, 4, 5, 6, 7, 8, 9, 10, 11, 12, 13, 14, 15, 16, 17, 18, 19, 20, 21, 22, 23, 24, 25, 26, 27, 28, 29, 30, 31, 32, 33, 34, 35, 36, 37, 38, 39, 40, 41, 42, 43, 44, 45, 46, 47, 48, 49, 50, 51, 52, 53, 54, 55, 56, 57, 58, 59, 60, 61, 62, 63, 64, 65, 66, 67, 68, 69, 70, 71, 72, 73, 74, 75, 76, 77, 78, 79, 80, 81, 82, 83, 84, 85, 86, 87, 88, 89, 90, 91, 92, 93, 94, 95, 96, 97, 98, 99, 100 or more amino acids in length (e.g., about 2 to about 40, about 2 to about 50, about 2 to about 60, about 4 to about 40, about 4 to about 50, about 4 to about 60, about 5 to about 40, about 5 to about 50, about 5 to about 60, about 9 to about 40, about 9 to about 50, about 9 to about 60, about 10 to about 40, about 10 to about 50, about 10 to about 60, or about 2, 3, 4, 5, 6, 7, 8, 9, 10, 11, 12, 13, 14, 15, 16, 17, 18, 19, 20, 21, 22, 23, 24, 25 amino acids to about 26, 27, 28, 29, 30, 31, 32, 33, 34, 35, 36, 37, 38, 39, 40, 41, 42, 43, 44, 45, 46, 47, 48, 49, 50, 51, 52, 53, 54, 55, 56, 57, 58, 59, 60, 61, 62, 63, 64, 65, 66, 67, 68, 69, 70, 71, 72, 73, 74, 75, 76, 77, 78, 79, 80, 81, 82, 83, 84, 85, 86, 87, 88, 89, 90, 91, 92, 93, 94, 95, 96, 97, 98, 99, 100 or more amino acids in length (e.g., about 105, 110, 115, 120, 130, 140 150 or more amino acids in length). In some embodiments, a peptide linker may be a GS linker.

[0056] As used herein, the term “linked,” or “fused” in reference to polynucleotides, refers to the attachment of one polynucleotide to another. In some embodiments, two or more polynucleotide molecules may be linked by a linker that can be an organic molecule, group, polymer, or chemical moiety such as a bivalent organic moiety. A polynucleotide may be linked or fused to another polynucleotide (at the 5′ end or the 3′ end) via a covalent or non-covenant linkage or binding, including e.g., Watson-Crick base-pairing, or through one or more linking nucleotides. In some embodiments, a polynucleotide motif of a certain structure may be inserted within another polynucleotide sequence (e.g., extension of the hairpin structure in guide RNA). In some embodiments, the linking nucleotides may be naturally occurring nucleotides. In some embodiments, the linking nucleotides may be non-naturally occurring nucleotides.

[0057] A “promoter” is a nucleotide sequence that controls or regulates the transcription of a nucleotide sequence (e.g., a coding sequence) that is operably associated with the promoter. The coding sequence controlled or regulated by a promoter may encode a polypeptide and/or a functional RNA. Typically, a “promoter” refers to a nucleotide sequence that contains a binding site for RNA polymerase II and directs the initiation of transcription. In general, promoters are found 5′, or upstream, relative to the start of the coding region of the corresponding coding sequence. A promoter may comprise other elements that act as regulators of gene expression; e.g., a promoter region. These include a TATA box consensus sequence, and often a CAAT box consensus sequence (Breathnach and Chambon, (1981) Annu. Rev. Biochem. 50:349). In plants, the CAAT box may be substituted by the AGGA box (Messing et al., (1983) in Genetic Engineering of Plants, T. Kosuge, C. Meredith and A. Hollaender (eds.), Plenum Press, pp. 211-227). In some embodiments, a promoter region may comprise at least one intron (e.g., SEQ ID NO:1 or SEQ ID NO:2).

[0058] Promoters useful with this invention can include, for example, constitutive, inducible, temporally regulated, developmentally regulated, chemically regulated, tissue-preferred and/or tissue-specific promoters for use in the preparation of recombinant nucleic acid molecules, e.g., “synthetic nucleic acid constructs” or “protein-RNA complex.” These various types of promoters are known in the art.

[0059] The choice of promoter may vary depending on the temporal and spatial requirements for expression, and also may vary based on the host cell to be transformed. Promoters for many different organisms are well known in the art. Based on the extensive knowledge present in the art, the appropriate promoter can be selected for the particular host organism of interest. Thus, for example, much is known about promoters upstream of highly constitutively expressed genes in model organisms and such knowledge can be readily accessed and implemented in other systems as appropriate.

[0060] In some embodiments, a promoter functional in a plant may be used with the constructs of this invention. Non-limiting examples of a promoter useful for driving expression in a plant include the promoter of the RubisCo small subunit gene 1 (PrbcS1), the promoter of the actin gene (Pactin), the promoter of the nitrate reductase gene (Pnr) and the promoter of duplicated carbonic anhydrase gene 1 (Pdca1) (See, Walker et al. Plant Cell Rep. 23:727-735 (2005); Li et al. Gene 403:132-142 (2007); Li et al. Mol Biol. Rep. 37:1143-1154 (2010)). PrbcS1 and Pactin are constitutive promoters and Pnr and Pdca1 are inducible promoters. Pnr is induced by nitrate and repressed by ammonium (Li et al. Gene 403:132-142 (2007)) and Pdca1 is induced by salt (Li et al. Mol Biol. Rep. 37:1143-1154 (2010)).

[0061] Examples of constitutive promoters useful for plants include, but are not limited to, cestrum virus promoter (cmp) (U.S. Pat. No. 7,166,770), the rice actin 1 promoter (Wang et al. (1992) Mol. Cell. Biol. 12:3399-3406; as well as U.S. Pat. No. 5,641,876), CaMV 35S promoter (Odell et al. (1985) Nature 313:810-812), CaMV 19S promoter (Lawton et al. (1987) Plant Mol. Biol. 9:315-324), nos promoter (Ebert et al. (1987) Proc. Natl. Acad. Sci USA 84:5745-5749), Adh promoter (Walker et al. (1987) Proc. Natl. Acad. Sci. USA 84:6624-6629), sucrose synthase promoter (Yang & Russell (1990) Proc. Natl. Acad. Sci. USA 87:4144-4148), and the ubiquitin promoter. The constitutive promoter derived from ubiquitin accumulates in many cell types. Ubiquitin promoters have been cloned from several plant species for use in transgenic plants, for example, sunflower (Binet et al., 1991. Plant Science 79: 87-94), maize (Christensen et al., 1989. Plant Molec. Biol. 12: 619-632), and arabidopsis (Norris et al. 1993. Plant Molec. Biol. 21:895-906). The maize ubiquitin promoter (UbiP) has been developed in transgenic monocot systems and its sequence and vectors constructed for monocot transformation are disclosed in the European patent publication EP0342926. The ubiquitin promoter is suitable for the expression of the nucleotide sequences of the invention in transgenic plants, especially monocotyledons. Further, the promoter expression cassettes described by McElroy et al. (Mol. Gen. Genet. 231: 150-160 (1991)) can be easily modified for the expression of the nucleotide sequences of the invention and are particularly suitable for use in monocotyledonous hosts.

[0062] In some embodiments, tissue specific/tissue preferred promoters can be used for expression of a heterologous polynucleotide in a plant cell. Tissue specific or preferred expression patterns include, but are not limited to, green tissue specific or preferred, root specific or preferred, stem specific or preferred, flower specific or preferred or pollen specific or preferred. Promoters suitable for expression in green tissue include many that regulate genes involved in photosynthesis and many of these have been cloned from both monocotyledons and dicotyledons. In one embodiment, a promoter useful with the invention is the maize PEPC promoter from the phosphoenol carboxylase gene (Hudspeth & Grula, Plant Molec. Biol. 12:579-589 (1989)). Non-limiting examples of tissue-specific promoters include those associated with genes encoding the seed storage proteins (such as 0-conglycinin, cruciferin, napin and phaseolin), zein or oil body proteins (such as oleosin), or proteins involved in fatty acid biosynthesis (including acyl carrier protein, stearoyl-ACP desaturase and fatty acid desaturases (fad 2-1)), and other nucleic acids expressed during embryo development (such as Bce4, see, e.g., Kridl et al. (1991) Seed Sci. Res. 1:209-219; as well as EP Patent No. 255378). Tissue-specific or tissue-preferential promoters useful for the expression of the nucleotide sequences of the invention in plants, particularly maize, include but are not limited to those that direct expression in root, pith, leaf or pollen. Such promoters are disclosed, for example, in WO 93/07278, incorporated by reference herein for its disclosure of promoters. Other non-limiting examples of tissue specific or tissue preferred promoters useful with the invention the cotton rubisco promoter disclosed in U.S. Pat. No. 6,040,504; the rice sucrose synthase promoter disclosed in U.S. Pat. No. 5,604,121; the root specific promoter described by de Framond (FEBS 290:103-106 (1991); European patent EP 0452269 to Ciba-Geigy); the stem specific promoter described in U.S. Pat. No. 5,625,136 (to Ciba-Geigy) and which drives expression of the maize trpA gene; the cestrum yellow leaf curling virus promoter disclosed in WO 01/73087; and pollen specific or preferred promoters including, but not limited to, ProOsLPS10 and ProOsLPS11 from rice (Nguyen et al. Plant Biotechnol. Reports 9(5):297-306 (2015)), ZmSTK2_USP from maize (Wang et al. Genome 60(6):485-495 (2017)), LAT52 and LAT59 from tomato (Twell et al. Development 109(3):705-713 (1990)), Zm13 (U.S. Pat. No. 10,421,972), PLA₂-δ promoter from arabidopsis (U.S. Pat. No. 7,141,424), and/or the ZmC5 promoter from maize (International PCT Publication No. WO1999/042587.

[0063] Additional examples of plant tissue-specific/tissue preferred promoters include, but are not limited to, the root hair-specific cis-elements (RHEs) (KIM ET AL. The Plant Cell 18:2958-2970 (2006)), the root-specific promoters RCc3 (Jeong et al. Plant Physiol. 153:185-197 (2010)) and RB7 (U.S. Pat. No. 5,459,252), the lectin promoter (Lindstrom et al. (1990) Der. Genet. 11:160-167; and Vodkin (1983) Prog. Clin. Biol. Res. 138:87-98), corn alcohol dehydrogenase 1 promoter (Dennis et al. (1984) Nucleic Acids Res. 12:3983-4000), S-adenosyl-L-methionine synthetase (SAMS) (Vander Mijnsbrugge et al. (1996) Plant and Cell Physiology, 37(8):1108-1115), corn light harvesting complex promoter (Bansal et al. (1992) Proc. Natl. Acad. Sci. USA 89:3654-3658), corn heat shock protein promoter (O'Dell et al. (1985) EAMBO J. 5:451-458; and Rochester et al. (1986) EMBO J. 5:451-458), pea small subunit RuBP carboxylase promoter (Cashmore, “Nuclear genes encoding the small subunit of ribulose-1,5-bisphosphate carboxylase” pp. 29-39 In: Genetic Engineering of Plants (Hollaender ed., Plenum Press 1983; and Poulsen et al. (1986)Mol. Gen. Genet. 205:193-200), Ti plasmid mannopine synthase promoter (Langridge et al. (1989) Proc. Natl. Acad. Sci. USA 86:3219-3223), Ti plasmid nopaline synthase promoter (Langridge et al. (1989), supra), petunia chalcone isomerase promoter (van Tunen et al. (1988) EMBO J. 7:1257-1263), bean glycine rich protein 1 promoter (Keller et al. (1989) Genes Dev. 3:1639-1646), truncated CaMV 35S promoter (O'Dell et al. (1985) Nature 313:810-812), potato patatin promoter (Wenzler et al. (1989) Plant Mol. Biol. 13:347-354), root cell promoter (Yamamoto et al. (1990) Nucleic Acids Res. 18:7449), maize zein promoter (Kriz et al. (1987) Mol. Gen. Genet. 207:90-98; Langridge et al. (1983) Cell 34:1015-1022; Reina et al. (1990) Nucleic Acids Res. 18:6425; Reina et al. (1990) Nucleic Acids Res. 18:7449; and Wandelt et al. (1989) Nucleic Acids Res. 17:2354), globulin-1 promoter (Belanger et al. (1991) Genetics 129:863-872), α-tubulin cab promoter (Sullivan et al. (1989) Mol. Gen. Genet. 215:431-440), PEPCase promoter (Hudspeth & Grula (1989) Plant Mol. Biol. 12:579-589), R gene complex-associated promoters (Chandler et al. (1989) Plant Cell 1:1175-1183), and chalcone synthase promoters (Franken et al. (1991) EMBO J 10:2605-2612).

[0064] Useful for seed-specific expression is the pea vicilin promoter (Czako et al. (1992) Mol. Gen. Genet. 235:33-40; as well as the seed-specific promoters disclosed in U.S. Pat. No. 5,625,136. Useful promoters for expression in mature leaves are those that are switched at the onset of senescence, such as the SAG promoter from Arabidopsis (Gan et al. (1995) Science 270:1986-1988).

[0065] In addition, promoters functional in chloroplasts can be used. Non-limiting examples of such promoters include the bacteriophage T3 gene 9 5′ UTR and other promoters disclosed in U.S. Pat. No. 7,579,516. Other promoters useful with the invention include but are not limited to the S-E9 small subunit RuBP carboxylase promoter and the Kunitz trypsin inhibitor gene promoter (Kti3).

[0066] Additional regulatory elements useful with this invention include, but are not limited to, introns, enhancers, termination sequences and/or 5′ and 3′ untranslated regions.

[0067] An intron useful with this invention can be an intron identified in and isolated from a plant and then inserted into an expression cassette to be used in transformation of a plant. As would be understood by those of skill in the art, introns can comprise the sequences required for self-excision and are incorporated into nucleic acid constructs/expression cassettes in frame. An intron can be used either as a spacer to separate multiple protein-coding sequences in one nucleic acid construct, or an intron can be used inside one protein-coding sequence to, for example, stabilize the mRNA. If they are used within a protein-coding sequence, they are inserted “in-frame” with the excision sites included. Introns may also be associated with promoters to improve or modify expression. As an example, a promoter/intron combination useful with this invention includes but is not limited to that of the maize Ubi1 promoter and intron.

[0068] Non-limiting examples of introns useful with the present invention include introns from the ADHI gene (e.g., Adh1-S introns 1, 2 and 6), the ubiquitin gene (Ubi1), the RuBisCO small subunit (rbcS) gene, the RuBisCO large subunit (rbcL) gene, the actin gene (e.g., actin-1 intron), the pyruvate dehydrogenase kinase gene (pdk), the nitrate reductase gene (nr), the duplicated carbonic anhydrase gene 1 (Tdca1), the psbA gene, the atpA gene, or any combination thereof.

[0069] An “editing system” as used herein refers to any site-specific (e.g., sequence-specific) nucleic acid editing system now known or later developed, which system can introduce a modification (e.g., a mutation) in a nucleic acid in a target specific manner. For example, an editing system can include, but is not limited to, a CRISPR-Cas editing system, a meganuclease editing system, a zinc finger nuclease (ZFN) editing system, a transcription activator-like effector nuclease (TALEN) editing system, a base editing system, and/or a prime editing system, each of which may comprise one or more polypeptide(s) and/or one or more polynucleotide(s) that when present and/or expressed together in a composition and/or cell can modify (e.g., mutate) a target nucleic acid in a sequence specific manner. In some embodiments, an editing system (e.g., a site- and/or sequence-specific editing system) comprises one or more polynucleotide(s) encoding for and/or one or more polypeptide(s) including, but not limited to, a nucleic acid binding polypeptide (e.g., a DNA binding domain) and/or a nuclease. In some embodiments, an editing system is encoded by one or more polynucleotide(s).

[0070] In some embodiments, an editing system comprises one or more sequence-specific nucleic acid binding polypeptide(s) (e.g., a DNA binding domain) that can be from, for example, a polynucleotide-guided endonuclease, a CRISPR-Cas effector protein (e.g., a CRISPR-Cas endonuclease), a zinc finger nuclease, a transcription activator-like effector nuclease (TALEN) and/or an Argonaute protein. In some embodiments, an editing system comprises one or more cleavage polypeptide(s) (e.g., a nuclease) such as, but not limited to, an endonuclease (e.g., Fok1), a polynucleotide-guided endonuclease, a CRISPR-Cas endonuclease, a zinc finger nuclease, and/or a transcription activator-like effector nuclease (TALEN).

[0071] A “nucleic acid binding polypeptide” as used herein refers to a polypeptide that binds and/or is capable of binding a nucleic acid in a site- and/or sequence specific manner. In some embodiments, a nucleic acid binding polypeptide comprises a DNA binding domain. In some embodiments, a nucleic acid binding polypeptide may be a sequence-specific nucleic acid binding polypeptide such as, but not limited to, a sequence-specific binding polypeptide and/or domain from, for example, a polynucleotide-guided endonuclease, a CRISPR-Cas effector protein (e.g., a CRISPR-Cas endonuclease), a zinc finger nuclease, a transcription activator-like effector nuclease (TALEN) and/or an Argonaute protein. In some embodiments, a nucleic acid binding polypeptide comprises a cleavage polypeptide (e.g., a nuclease polypeptide and/or domain) such as, but not limited to, an endonuclease (e.g., Fok1), a polynucleotide-guided endonuclease, a CRISPR-Cas endonuclease, a zinc finger nuclease, and/or a transcription activator-like effector nuclease (TALEN). In some embodiments, the nucleic acid binding polypeptide associates with and/or is capable of associating with (e.g., forms a complex with) one or more nucleic acid molecule(s) (e.g., forms a complex with a guide nucleic acid as described herein) that can direct or guide the nucleic acid binding polypeptide to a specific target nucleotide sequence (e.g., a gene locus of a genome) that is complementary to the one or more nucleic acid molecule(s) (or a portion or region thereof), thereby causing the nucleic acid binding polypeptide to bind to the nucleotide sequence at the specific target site. In some embodiments, the nucleic acid binding polypeptide is a CRISPR-Cas effector protein as described herein. In some embodiments, reference is made to specifically to a CRISPR-Cas effector protein for simplicity, but a nucleic acid binding polypeptide as described herein may be used.

[0072] In some embodiments, an editing system comprises a ribonucleoprotein such as an assembled ribonucleoprotein complex (e.g., a ribonucleoprotein that comprises a CRISPR-Cas effector protein and a guide nucleic acid in the form of complex). A complex of an editing system may be a covalently and/or non-covalently bound complex. An editing system, as used herein, may be assembled when introduced into a plant cell (e.g., assembled into a complex prior to introduction into the plant cell) and/or may assemble into a complex (e.g., a covalently and/or non-covalently bound complex) after and/or during introduction into a plant cell. Exemplary ribonucleoproteins and methods of use thereof include, but are not limited to, those described in Malnoy et al., (2016) Front. Plant Sci. 7:1904; Subburaj et al., (2016) Plant Cell Rep. 35:1535; Woo et al., (2015) Nat. Biotechnol. 33:1162; Liang et al., (2017) Nat. Commun. 8:14261; Svitashev et al., Nat. Commun. 7, 13274 (2016); Zhang et al., (2016) Nat. Commun. 7:12617; Kim et al., (2017) Nat. Commun. 8:14406.

[0073] In some embodiments, a polynucleotide and/or a nucleic acid construct of the invention can be an “expression cassette” or can be comprised within an expression cassette. As used herein, “expression cassette” means a recombinant nucleic acid molecule comprising, for example, a nucleic acid construct of the invention (e.g., a polynucleotide encoding a CRISPR-Cas effector protein, a polynucleotide encoding a deaminase (e.g., a cytosine deaminase and/or an adenine deaminase), and/or a polynucleotide comprising a guide nucleic acid), wherein the nucleic acid construct is operably associated with at least a control sequence (e.g., a promoter). Thus, some embodiments of the invention provide expression cassettes designed to express, for example, a nucleic acid construct of the invention. When an expression cassette comprises more than one polynucleotide, the polynucleotides may be operably linked to a single promoter that drives expression of all of the polynucleotides or the polynucleotides may be operably linked to one or more separate promoters (e.g., three polynucleotides may be driven by one, two or three promoters in any combination). Thus, for example, a polynucleotide encoding a CRISPR-Cas effector protein, a polynucleotide encoding a deaminase, and a polynucleotide comprising a guide nucleic acid comprised in an expression cassette may each be operably associated with a single promoter or one or more of the polynucleotide(s) may be operably associated with separate promoters (e.g., two or three promoters in any combination), which may be the same or different from each other.

[0074] In some embodiments, an expression cassette comprising the polynucleotides/nucleic acid constructs of the invention may be optimized for expression in an organism (e.g., an animal, a plant, a bacterium and the like).

[0075] An expression cassette comprising a nucleic acid construct of the invention may be chimeric, meaning that at least one of its components is heterologous with respect to at least one of its other components (e.g., a promoter from the host organism operably linked to a polynucleotide of interest to be expressed in the host organism, wherein the polynucleotide of interest is from a different organism than the host or is not normally found in association with that promoter). An expression cassette may also be one that is naturally occurring but has been obtained in a recombinant form useful for heterologous expression.

[0076] An expression cassette can optionally include a transcriptional and/or translational termination region (i.e., termination region) and/or an enhancer region that is functional in the selected host cell. A variety of transcriptional terminators and enhancers are known in the art and are available for use in expression cassettes. Transcriptional terminators are responsible for the termination of transcription and correct mRNA polyadenylation. A termination region and/or the enhancer region may be native to the transcriptional initiation region, may be native to a gene encoding a CRISPR-Cas effector protein or a gene encoding a deaminase, may be native to a host cell, or may be native to another source (e.g., foreign or heterologous to the promoter, to a gene encoding the CRISPR-Cas effector protein or a gene encoding the deaminase, to a host cell, or any combination thereof).

[0077] An expression cassette of the invention also can include a polynucleotide encoding a selectable marker, which can be used to select a transformed host cell. As used herein, “selectable marker” means a polynucleotide sequence that when expressed imparts a distinct phenotype to the host cell expressing the marker and thus allows such transformed cells to be distinguished from those that do not have the marker. Such a polynucleotide sequence may encode either a selectable or screenable marker, depending on whether the marker confers a trait that can be selected for by chemical means, such as by using a selective agent (e.g., an antibiotic and the like), or on whether the marker is simply a trait that one can identify through observation or testing, such as by screening (e.g., fluorescence). Many examples of suitable selectable markers are known in the art and can be used in the expression cassettes described herein.

[0078] The expression cassettes, the nucleic acid molecules/constructs and polynucleotide sequences described herein can be used in connection with vectors. The term “vector” refers to a composition for transferring, delivering or introducing a nucleic acid (or nucleic acids) into a cell. A vector comprises a nucleic acid construct comprising the nucleotide sequence(s) to be transferred, delivered or introduced. Vectors for use in transformation of host organisms are well known in the art. Non-limiting examples of general classes of vectors include viral vectors, plasmid vectors, phage vectors, phagemid vectors, cosmid vectors, fosmid vectors, bacteriophages, artificial chromosomes, minicircles, or Agrobacterium binary vectors in double or single stranded linear or circular form which may or may not be self transmissible or mobilizable. In some embodiments, a viral vector can include, but is not limited, to a retroviral, lentiviral, adenoviral, adeno-associated, or herpes simplex viral vector. A vector as defined herein can transform a prokaryotic or eukaryotic host either by integration into the cellular genome or exist extrachromosomally (e.g., autonomous replicating plasmid with an origin of replication). Additionally, included are shuttle vectors by which is meant a DNA vehicle capable, naturally or by design, of replication in two different host organisms, which may be selected from actinomycetes and related species, bacteria and eukaryotic (e.g., higher plant, mammalian, yeast or fungal cells). In some embodiments, the nucleic acid in the vector is under the control of, and operably linked to, an appropriate promoter or other regulatory elements for transcription in a host cell. The vector may be a bi-functional expression vector which functions in multiple hosts. In the case of genomic DNA, this may contain its own promoter and/or other regulatory elements and in the case of cDNA this may be under the control of an appropriate promoter and/or other regulatory elements for expression in the host cell. Accordingly, a nucleic acid construct of this invention and/or expression cassettes comprising the same may be comprised in vectors as described herein and as known in the art.

[0079] As used herein, “contact,” “contacting,” “contacted,” and grammatical variations thereof, refer to placing the components of a desired reaction together under conditions suitable for carrying out the desired reaction (e.g., transformation, transcriptional control, genome editing, nicking, and/or cleavage). Thus, for example, a target nucleic acid may be contacted with a nucleic acid construct of the invention encoding, for example, a nucleic acid binding polypeptide (e.g., a DNA binding domain such as a sequence-specific DNA binding protein (e.g., a polynucleotide-guided endonuclease, a CRISPR-Cas effector protein (e.g., CRISPR-Cas endonuclease), a zinc finger nuclease, a transcription activator-like effector nuclease (TALEN) and/or an Argonaute protein)), a guide nucleic acid, and/or a deaminase under conditions whereby the nucleic acid binding polypeptide is expressed, and the nucleic acid binding polypeptide (e.g., CRISPR-Cas effector protein) forms a complex with the guide nucleic acid, the complex hybridizes to the target nucleic acid, and optionally the deaminase is recruited to the nucleic acid binding polypeptide (and thus, to the target nucleic acid) or the deaminase is fused to the nucleic acid binding polypeptide, thereby modifying the target nucleic acid. In some embodiments, a CRISPR-Cas effector protein, a guide nucleic acid, and a deaminase contact a target nucleic acid to thereby modify the nucleic acid. In some embodiments, the CRISPR-Cas effector protein, a guide nucleic acid, and/or a deaminase may be in the form of a complex (e.g., a ribonucleoprotein such as an assembled ribonucleoprotein complex) and the complex contacts the target nucleic acid. In some embodiments, the complex or a component thereof (e.g., the guide nucleic acid) hybridizes to the target nucleic acid and thereby the target nucleic acid is modified (e.g., via action of the CRISPR-Cas effector protein and/or deaminase). In some embodiments, the deaminase and the nucleic acid binding polypeptide localize at the target nucleic acid, optionally through covalent and/or non-covalent interactions.

[0080] As used herein, “modifying” or “modification” in reference to a target nucleic acid includes editing (e.g., mutating), covalent modification, exchanging/substituting nucleic acids/nucleotide bases, deleting, cleaving, and/or nicking of a target nucleic acid to thereby provide a modified nucleic acid and/or altering transcriptional control of a target nucleic acid to thereby provide a modified nucleic acid. In some embodiments, a modification may include an insertion and/or deletion of any size and/or a single base change (SNP) of any type. In some embodiments, a modification comprises a SNP. In some embodiments, a modification comprises exchanging and/or substituting one or more (e.g., 1, 2, 3, 4, 5, or more) nucleotides. In some embodiments, an insertion or deletion may be about 1 base to about 30,000 consecutive bases in length (e.g., about 1, 2, 3, 4, 5, 6, 7, 8, 9, 10, 11, 12, 13, 14, 15, 16, 17, 18, 19, 20, 21, 22, 23, 24, 25, 26, 27, 28, 29, 30, 31, 32, 33, 34, 35, 36, 37, 38, 39, 40, 41, 42, 43, 44, 45, 46, 47, 48, 49, 50, 51, 52, 53, 54, 55, 56, 57, 58, 59, 60, 61, 62, 63, 64, 65, 66, 67, 68, 69, 70, 71, 72, 73, 74, 75, 76, 77, 78, 79, 80, 81, 82, 83, 84, 85, 86, 87, 88, 89, 90, 91, 92, 93, 94, 95, 96, 97,98,99,100,110,120, 130,140, 150, 160, 170, 180, 190,200,210,220,230,240,250,260, 270, 280, 290, 300, 310, 320, 330, 340, 350, 360, 370, 380, 390, 400, 410, 400, 410, 420, 430, 440, 450, 460, 470, 480, 490, 500, 510, 520, 530, 540, 550, 560, 570, 580, 590, 600, 610, 620, 630, 640, 650, 660, 670, 680, 690, 700, 710, 720, 730, 740, 750, 760, 770, 780, 790, 800, 810, 820, 830, 840, 850, 860, 870, 880, 890, 900, 910, 920, 930, 940, 950, 960, 970, 980, 990, 1000, 1100, 1200, 1300, 1400, 1500, 1600, 1700, 1800, 1900, 2000, 2500, 3000, 3500, 4000, 4500, 5000, 5500, 6000, 6500, 7000, 7500, 8000, 8500, 9000, 9500, 10,000, 10,500, 11,000, 11,500, 12,000, 12,500, 13,000, 13,500, 14,000, 14,500, 15,000, 15,500, 16,000, 16,500, 17,000, 17,500, 18,000, 18,500, 19,000, 19,500, 20,000, 20,500, 21,000, 21,500, 22,000, 22,500, 23,000, 23,500, 24,000, 24,500, 25,000, 25,500, 26,000, 26,500, 27,000, 27,500, 28,000, 28,500, 29,000, 29,500, 30,000 consecutive bases in length or more, or any value or range therein). Thus, in some embodiments, an insertion or deletion may be about 1, 2, 3, 4, 5,6,7, 8,9, 10, 11, 12, 13, 14, 15, 16, 17, 18, 19, 20, 21, 22, 23, 24, 25, 26, 27, 28, 29, 30, 31, 32, 33, 34, 35, 36, 37, 38, 39, 40, 41, 42, 43, 44, 45, 46, 47, 48, 49, 50, 51, 52, 53, 54, 55, 56, 57, 58, 59, 60, 61, 62, 63, 64, 65, 66, 67, 68, 69, 70, 71, 72, 73, 74, 75, 76, 77, 78, 79, 80, 81, 82, 83, 84, 85, 86, 87, 88, 89, 90, 91, 92, 93, 94, 95, 96, 97, 98, 99, 100, 110, 120, 130, 140, 150, 160, 170, 180, 190, 200, 210, 220, 230, 240, 250, 260, 270, 280, 290, 300 consecutive bases to about 310, 320, 330, 340, 350, 360, 370, 380, 390, 400, 410, 420, 430, 440, 450, 460, 470, 480, 490, 500, 510, 520, 530, 540, 550, 560, 570, 580, 590, 600, 610, 620, 630, 640, 650, 660, 670, 680, 690, 700, 710, 720, 730, 740, 750, 760, 770, 780, 790, 800, 810, 820, 830, 840, 850, 860, 870, 880, 890, 900, 910, 920, 930, 940, 950, 960, 970, 980, 990, 1000 consecutive bases in length, or any range or value therein; about 50, 51, 52, 53, 54, 55, 56, 57, 58, 59, 60, 61, 62, 63, 64, 65, 66, 67, 68, 69, 70, 71, 72, 73, 74, 75, 76, 77, 78, 79, 80, 81, 82, 83, 84, 85, 86, 87, 88, 89, 90, 91, 92, 93, 94, 95, 96, 97, 98, 99, 100, 110, 120, 130, 140, 150, 160, 170, 180, 190, 200, 210, 220, 230, 240, 250, 260, 270, 280, 290, 300 consecutive bases to about 310, 320, 330, 340, 350, 360, 370, 380, 390, 400, 410, 420, 430, 440, 450, 460, 470, 480, 490, 500, 510, 520, 530, 540, 550, 560, 570, 580, 590, 600, 610, 620, 630, 640, 650, 660, 670, 680, 690, 700, 710, 720, 730, 740, 750, 760, 770, 780, 790, 800, 810, 820, 830, 840, 850, 860, 870, 880, 890, 900, 910, 920, 930, 940, 950, 960, 970, 980, 990, 1000, 1100, 1200, 1300, 1400, 1500, 1600, 1700, 1800, 1900, 2000 consecutive bases or more in length, or any value or range therein; about 500, 510, 520, 530, 540, 550, 560, 570, 580, 590, 600, 610, 620, 630, 640, 650, 660, 670, 680, 690, 700, 710, 720, 730, 740, 750, 760, 770, 780, 790, 800, 810, 820, 830, 840, 850, 860, 870, 880, 890, 900, 910, 920, 930, 940, 950, 960, 970, 980, 990, 1000, 1100, 1200, 1300, 1400, 1500, 1600, 1700, 1800, 1900, 2000 consecutive bases to about 2500, 3000, 3500, 4000, 4500, 5000, 5500, 6000, 6500, 7000, 7500, 8000, 8500, 9000, 9500, or 10,000 consecutive bases or more in length, or any value or range therein; or about 400, 410, 420, 430, 440, 450, 460, 470, 480, 490, 500, 510, 520, 530, 540, 550, 560, 570, 580, 590, 600, 610, 620, 630, 640, 650, 660, 670, 680, 690, or 700 consecutive bases to about 710, 720, 730, 740, 750, 760, 770, 780, 790, 800, 810, 820, 830, 840, 850, 860, 870, 880, 890, 900, 910, 920, 930, 940, 950, 960, 970, 980, 990, 1000, 1100, 1200, 1300, 1400, 1500, 1600, 1700, 1800, 1900, 2000, 2500, 3000, 3500, 4000, 4500, or 5000 consecutive bases or more in length, or any value or range therein. In some embodiments, an insertion or deletion may be about 1000, 1100, 1200, 1300, 1400, 1500, 1600, 1700, 1800, 1900, 2000, 2500, 3000, 3500, 4000, 4500, 5000, 5500, 6000, 6500, 7000, 7500, 8000, 8500, 9000, 9500, or 10,000 consecutive bases to about 10,500, 11,000, 11,500, 12,000, 12,500, 13,000, 13,500, 14,000, 14,500, 15,000, 15,500, 16,000, 16,500, 17,000, 17,500, 18,000, 18,500, 19,000, 19,500, 20,000, 20,500, 21,000, 21,500, 22,000, 22,500, 23,000, 23,500, 24,000, 24,500, 25,000, 25,500, 26,000, 26,500, 27,000, 27,500, 28,000, 28,500, 29,000, 29,500, or 30,000 consecutive bases or more in length, or any value or range therein.

[0081] “Recruit,” “recruiting” or “recruitment” as used herein refer to attracting one or more polypeptide(s) or polynucleotide(s) to another polypeptide or polynucleotide (e.g., to a particular location in a genome) using protein-protein interactions, nucleic acid-protein interactions (e.g., RNA-protein interactions), and/or chemical interactions. Protein-protein interactions can include, but are not limited to, peptide tags (epitopes, multimerized epitopes) and corresponding affinity polypeptides, RNA recruiting motifs and corresponding affinity polypeptides, and/or chemical interactions. Example chemical interactions that may be useful with polypeptides and polynucleotides for the purpose of recruitment can include, but are not limited to, rapamycin-inducible dimerization of FRB—FKBP; Biotin-streptavidin interaction; SNAP tag (Hussain et al. Curr Pharm Des. 19(30):5437-42 (2013)); Halo tag (Los et al. ACS Chem Biol. 3(6):373-82 (2008)); CLIP tag (Gautier et al. Chemistry & Biology 15:128-136 (2008)); DmrA-DmrC heterodimer induced by a compound (Tak et al. Nat Methods 14(12):1163-1166 (2017)); Bifunctional ligand approaches (fuse two protein-binding chemicals together) (Voβ et al. Curr Opin Chemical Biology 28:194-201 (2015)) (e.g. dihyrofolate reductase (DHFR) (Kopyteck et al. Cell Cehm Biol 7(5):313-321 (2000)).

[0082] “Introducing,” “introduce,” “introduced” (and grammatical variations thereof) in the context of a polynucleotide means presenting a nucleotide sequence of interest (e.g., polynucleotide, a nucleic acid construct, and/or a guide nucleic acid) to a host organism or cell of said organism (e.g., host cell; e.g., a plant cell) in such a manner that the nucleotide sequence gains access to the interior of a cell. Thus, for example, a polynucleotide from an Agrobacterium rhizogenes strain (that may encode or comprise at least a portion of an editing system) may be introduced into a cell of an organism, thereby transforming the cell with the polynucleotide. In some embodiments, a nucleic acid construct of the invention encoding a CRISPR-Cas effector protein, a guide nucleic acid, and a deaminase (e.g., a cytosine deaminase and/or adenine deaminase) may be introduced into a cell of an organism, thereby transforming the cell with the CRISPR-Cas effector protein, guide nucleic acid, and deaminase. In some embodiments, the organism is a eukaryote (e.g., a mammal such as a human).

[0083] The term “transformation” as used herein refers to the introduction of a heterologous nucleic acid into a cell. Transformation of a cell may be stable or transient. Thus, in some embodiments, a host cell or host organism may be stably transformed with a polynucleotide/nucleic acid molecule of the invention. In some embodiments, a host cell or host organism may be transiently transformed with a nucleic acid construct of the invention.

[0084] “Transient transformation” in the context of a polynucleotide means that a polynucleotide is introduced into a cell (e.g., by a transformation and/or transfection approach) and does not integrate into the genome of the cell; thus, the cell is transiently transformed with the polynucleotide. A nucleic acid that is “transiently expressed” as used herein refers to a nucleic acid that has been introduced into a cell and the nucleic acid is not integrated into the genome of the cell, thereby the cell is transiently transformed with the nucleic acid.

[0085] By “stably introducing” or “stably introduced” in the context of a polynucleotide introduced into a cell (e.g., by a transformation and/or transfection approach) is intended that the introduced polynucleotide is stably incorporated into the genome of the cell, and thus the cell is stably transformed with the polynucleotide. A nucleic acid that is “stably expressed” as used herein refers to a nucleic acid that has been introduced into a cell and the nucleic acid is integrated into the genome of the cell, thereby the cell is stably transformed with the nucleic acid.

[0086] “Stable transformation” or “stably transformed” as used herein means that a nucleic acid molecule is introduced into a cell (e.g., by a transformation and/or transfection approach) and integrates into the genome of the cell. As such, the integrated nucleic acid molecule is capable of being inherited by the progeny thereof, more particularly, by the progeny of multiple successive generations. “Genome” as used herein includes the nuclear and the plastid genome, and therefore includes integration of the nucleic acid into, for example, the chloroplast or mitochondrial genome. Stable transformation as used herein can also refer to a transgene that is maintained extrachromasomally, for example, as a minichromosome or a plasmid.

[0087] Transient transformation may be detected by, for example, an enzyme-linked immunosorbent assay (ELISA) or Western blot, which can detect the presence of a peptide or polypeptide encoded by one or more transgene introduced into an organism. Stable transformation of a cell can be detected by, for example, a Southern blot hybridization assay of genomic DNA of the cell with nucleic acid sequences which specifically hybridize with a nucleotide sequence of a transgene introduced into an organism (e.g., a plant). Stable transformation of a cell can be detected by, for example, a Northern blot hybridization assay of RNA of the cell with nucleic acid sequences which specifically hybridize with a nucleotide sequence of a transgene introduced into a host organism. Stable transformation of a cell can also be detected by, e.g., a polymerase chain reaction (PCR) or other amplification reactions as are well known in the art, employing specific primer sequences that hybridize with target sequence(s) of a transgene, resulting in amplification of the transgene sequence, which can be detected according to standard methods Transformation can also be detected by direct sequencing and/or hybridization protocols well known in the art.

[0088] An “edited cell,” “edited plant,” “edited plant part,” “edited root,” “edited callus,” “edited plantlet,” and/or the like as used herein refer to a cell, plant, plant part, root, callus, plant part, and/or the like, respectively, that comprises a modified nucleic acid in that a target nucleic acid been modified using an editing system as described herein to provide the modified nucleic acid. Thus, an “edited cell,” “edited plant,” “edited plant part,” “edited root,” “edited callus,” “edited plantlet,” and/or the like comprise a nucleic acid (i.e., a modified nucleic acid) that has been modified and/or changed compared to its unmodified or native sequence and/or structure.

[0089] The terms “transgene” or “transgenic” as used herein refer to at least one nucleic acid sequence that is taken from the genome of one organism, or produced synthetically, and which is then introduced into a host cell (e.g., a plant cell) or organism or tissue of interest and which is subsequently integrated into the host's genome by means of “stable” transformation or transfection approaches. In contrast, the term “transient” transformation or transfection or introduction refers to a way of introducing molecular tools including at least one nucleic acid (DNA, RNA, single-stranded or double-stranded or a mixture thereof) and/or at least one amino acid sequence, optionally comprising suitable chemical or biological agents, to achieve a transfer into at least one compartment of interest of a cell, including, but not restricted to, the cytoplasm, an organelle, including the nucleus, a mitochondrion, a vacuole, a chloroplast, or into a membrane, resulting in transcription and/or translation and/or association and/or activity of the at least one molecule introduced without achieving a stable integration or incorporation and thus inheritance of the respective at least one molecule introduced into the genome of a cell. The term “transgene-free” refers to a condition in which a transgene is not present or found in the genome of a host cell or tissue or organism of interest.

[0090] Accordingly, in some embodiments, nucleotide sequences, polynucleotides, nucleic acid constructs, and/or expression cassettes of the invention may be expressed transiently and/or they can be stably incorporated into the genome of the host organism. Thus, in some embodiments, a nucleic acid construct of the invention may be transiently introduced into a cell with a guide nucleic acid and as such, no foreign or introduced DNA is inserted into the genome of the cell.

[0091] A nucleic acid construct of the invention can be introduced into a cell by any method known to those of skill in the art. In some embodiments, transformation methods include, but are not limited to, transformation via bacterial-mediated nucleic acid delivery (e.g., via Agrobacteria), viral-mediated nucleic acid delivery, silicon carbide and/or nucleic acid whisker-mediated nucleic acid delivery, liposome mediated nucleic acid delivery, microinjection, microparticle bombardment, calcium-phosphate-mediated transformation, cyclodextrin-mediated transformation, electroporation, nanoparticle-mediated transformation, sonication, infiltration, PEG-mediated nucleic acid uptake, as well as any other electrical, chemical, physical (mechanical) and/or biological mechanism that results in the introduction of nucleic acid into the plant cell, including any combination thereof. In some embodiments of the invention, transformation of a cell comprises nuclear transformation. In some embodiments, transformation of a cell comprises plastid transformation (e.g., chloroplast transformation). In some embodiments, a recombinant nucleic acid construct of the invention can be introduced into a cell via conventional breeding techniques.

[0092] Procedures for transforming both eukaryotic and prokaryotic organisms are well known and routine in the art and are described throughout the literature (See, for example, Jiang et al. 2013. Nat. Biotechnol. 31:233-239; Ran et al. Nature Protocols 8:2281-2308 (2013)). General guides to various plant transformation methods known in the art include Miki et al. (“Procedures for Introducing Foreign DNA into Plants” in Methods in Plant Molecular Biology and Biotechnology, Glick, B. R. and Thompson, J. E., Eds. (CRC Press, Inc., Boca Raton, 1993), pages 67-88) and Rakowoczy-Trojanowska (Cell. Mol. Biol. Lett. 7:849-858 (2002)).

[0093] A polynucleotide and/or polypeptide can be introduced into a host organism or its cell (optionally a plant, plant part, and/or plant cell) in any number of ways that are well known in the art. The methods of the invention do not depend on a particular method for introducing one or more nucleotide sequences into the organism, only that they gain access to the interior of at least one cell of the organism. Where more than one nucleotide sequence is to be introduced, they can be assembled as part of a single nucleic acid construct, or as separate nucleic acid constructs, and can be located on the same or different nucleic acid constructs. A polynucleotide and/or polypeptide can be introduced into the cell of interest in a single transformation event, and/or in separate transformation events, or, alternatively, a polynucleotide and/or polypeptide can be incorporated into a plant, for example, as part of a breeding protocol. In some embodiments, the cell is a eukaryotic cell (e.g., a mammalian such as a human cell or a plant cell).

[0094] As used herein, a “CRISPR-Cas effector protein” is a protein or polypeptide or domain thereof that cleaves, cuts, or nicks a nucleic acid, binds a nucleic acid (e.g., a target nucleic acid and/or a guide nucleic acid), and/or that identifies, recognizes, or binds a guide nucleic acid as defined herein. In some embodiments, a CRISPR-Cas effector protein may be an enzyme (e.g., a nuclease, endonuclease, nickase, etc.) or portion thereof and/or may function as an enzyme. In some embodiments, a CRISPR-Cas effector protein refers to a CRISPR-Cas nuclease polypeptide or domain thereof that comprises nuclease activity or in which the nuclease activity has been reduced or eliminated, and/or comprises nickase activity or in which the nickase has been reduced or eliminated, and/or comprises single stranded DNA cleavage activity (ss DNAse activity) or in which the ss DNAse activity has been reduced or eliminated, and/or comprises self-processing RNAse activity or in which the self-processing RNAse activity has been reduced or eliminated. A CRISPR-Cas effector protein may bind to a target nucleic acid. A CRISPR-Cas effector protein may be a Type I, II, III, IV, V, or VI CRISPR-Cas effector protein. In some embodiments, a CRISPR-Cas effector protein may be from a Type I CRISPR-Cas system, a Type II CRISPR-Cas system, a Type III CRISPR-Cas system, a Type IV CRISPR-Cas system, Type V CRISPR-Cas system, or a Type VI CRISPR-Cas system. In some embodiments, a CRISPR-Cas effector protein of the invention may be from a Type II CRISPR-Cas system or a Type V CRISPR-Cas system. In some embodiments, a CRISPR-Cas effector protein may be a Type II CRISPR-Cas effector protein, for example, a Cas9 effector protein. In some embodiments, a CRISPR-Cas effector protein may be Type V CRISPR-Cas effector protein, for example, a Cas12 effector protein.

[0095] In some embodiments, a CRISPR-Cas effector protein may be or include, but is not limited to, a Cas9, C2c1, C2c3, Cas12a (also referred to as Cpf1), Cas12b, Cas12c, Cas12d, Cas12e, Cas13a, Cas13b, Cas13c, Cas13d, Casl, CaslB, Cas2, Cas3, Cas3′, Cas3″, Cas4, Cas5, Cas6, Cas7, Cas8, Cas9 (also known as Csnl and Csx12), Cas10, Csyl, Csy2, Csy3, Csel, Cse2, Cscl, Csc2, Csa5, Csn2, Csm2, Csm3, Csm4, Csm5, Csm6, Cmrl, Cmr3, Cmr4, Cmr5, Cmr6, Csbl, Csb2, Csb3, Csx17, Csx14, Csx10, Csx16, CsaX, Csx3, Csxl, Csx15, Csfl, Csf2, Csf3, Csf4 (dinG), and/or Csf5 nuclease, optionally wherein the CRISPR-Cas effector protein may be a Cas9, Cas12a (Cpf1), Cas12b, Cas12c (C2c3), Cas12d (CasY), Cas12e (CasX), Cas12g, Cas12h, Cas12i, C2c4, C2c5, C2c8, C2c9, C2c10, Cas14a, Cas14b, and/or Cas14c effector protein.

[0096] In some embodiments, a CRISPR-Cas effector protein useful with the invention may comprise a mutation in its nuclease active site (e.g., RuvC, HNH, e.g., RuvC site of a Cas12a nuclease domain; e.g., RuvC site and/or HNH site of a Cas9 nuclease domain). A CRISPR-Cas effector protein having a mutation in its nuclease active site, and therefore, no longer comprising nuclease activity, is commonly referred to as “dead,” e.g., dCas9. In some embodiments, a CRISPR-Cas effector protein domain or polypeptide having a mutation in its nuclease active site may have impaired activity or reduced activity as compared to the same CRISPR-Cas effector protein without the mutation, e.g., a nickase, e.g, Cas9 nickase, Cas12a nickase.

[0097] A CRISPR Cas9 effector protein or CRISPR Cas9 effector domain useful with this invention may be any known or later identified Cas9 nuclease. In some embodiments, a CRISPR Cas9 polypeptide can be a Cas9 polypeptide from, for example, Streptococcus spp. (e.g., S. pyogenes, S. thermophilus), Lactobacillus spp., Bifidobacterium spp., Kandleria spp., Leuconostoc spp., Oenococcus spp., Pediococcus spp., Weissella spp., and/or Olsenella spp. In some embodiments, a CRISPR-Cas effector protein may be a Cas9 polypeptide or domain thereof and optionally may have a nucleotide sequence of any one of SEQ ID NOs:3-13 or 60-63 and/or an amino acid sequence of any one of SEQ ID NOs:14-15.

[0098] In some embodiments, the CRISPR-Cas effector protein may be a Cas9 polypeptide derived from Streptococcus pyogenes and recognizes the PAM sequence motif NGG, NAG, NGA (Mali et al, Science 2013; 339(6121): 823-826). In some embodiments, the CRISPR-Cas effector protein may be a Cas9 polypeptide derived from Streptococcus thermophiles and recognizes the PAM sequence motif NGGNG and/or NNAGAAW (W=A or T) (See, e.g., Horvath et al, Science, 2010; 327(5962): 167-170, and Deveau et al, J Bacteriol 2008; 190(4): 1390-1400). In some embodiments, the CRISPR-Cas effector protein may be a Cas9 polypeptide derived from Streptococcus mutans and recognizes the PAM sequence motif NGG and/or NAAR (R=A or G) (See, e.g., Deveau et al, J BACTERIOL 2008; 190(4): 1390-1400). In some embodiments, the CRISPR-Cas effector protein may be a Cas9 polypeptide derived from Streptococcus aureus and recognizes the PAM sequence motif NNGRR (R=A or G). In some embodiments, the CRISPR-Cas effector protein may be a Cas9 protein derived from S. aureus, which recognizes the PAM sequence motif N GRRT (R=A or G). In some embodiments, the CRISPR-Cas effector protein may be a Cas9 polypeptide derived from S. aureus, which recognizes the PAM sequence motif N GRRV (R=A or G). In some embodiments, the CRISPR-Cas effector protein may be a Cas9 polypeptide that is derived from Neisseria meningitidis and recognizes the PAM sequence motif N GATT or N GCTT (R=A or G, V=A, G or C) (See, e.g., Hou et ah, PNAS 2013, 1-6). In the aforementioned embodiments, N can be any nucleotide residue, e.g., any of A, G, C or T. In some embodiments, the CRISPR-Cas effector protein may be a Cas13a protein derived from Leptotrichia shahii, which recognizes a protospacer flanking sequence (PFS) (or RNA PAM (rPAM)) sequence motif of a single 3′ A, U, or C, which may be located within the target nucleic acid.

[0099] A Type V CRISPR-Cas effector protein useful with embodiments of the invention may be any Type V CRISPR-Cas nuclease. A Type V CRISPR-Cas nuclease useful with this invention as an effector protein can include, but is not limited, to Cas12a (Cpf1), Cas12b, Cas12c (C2c3), Cas12d (CasY), Cas12e (CasX), Cas12g, Cas12h, Cas12i, C2c1, C2c4, C2c5, C2c8, C2c9, C2c10, Cas14a, Cas14b, and/or Cas14c nuclease. In some embodiments, a Type V CRISPR-Cas nuclease polypeptide or domain useful with embodiments of the invention may be a Cas12a polypeptide or domain. In some embodiments, a Type V CRISPR-Cas effector protein or domain useful with embodiments of the invention may be a nickase, optionally, a Cas12a nickase. In some embodiments, a CRISPR-Cas effector protein may be a Cas12a polypeptide or domain thereof and optionally may have an amino acid sequence of any one of SEQ ID NOs:16-32 and/or a nucleotide sequence of any one of SEQ ID NOs:33-35.

[0100] In some embodiments, the CRISPR-Cas effector protein may be derived from Cas12a, which is a Type V Clustered Regularly Interspaced Short Palindromic Repeats (CRISPR)-Cas nuclease. Cas12a differs in several respects from the more well-known Type II CRISPR Cas9 nuclease. For example, Cas9 recognizes a G-rich protospacer-adjacent motif (PAM) that is 3′ to its guide RNA (gRNA, sgRNA, crRNA, crDNA, CRISPR array) binding site (protospacer, target nucleic acid, target DNA) (3′-NGG), while Cas12a recognizes a T-rich PAM that is located 5′ to the target nucleic acid (5′-TTN, 5′-TTTN. In fact, the orientations in which Cas9 and Cas12a bind their guide RNAs are very nearly reversed in relation to their N and C termini. Furthermore, Cas12a enzymes use a single guide RNA (gRNA, CRISPR array, crRNA) rather than the dual guide RNA (sgRNA (e.g., crRNA and tracrRNA)) found in natural Cas9 systems, and Cas12a processes its own gRNAs. Additionally, Cas12a nuclease activity produces staggered DNA double stranded breaks instead of blunt ends produced by Cas9 nuclease activity, and Cas12a relies on a single RuvC domain to cleave both DNA strands, whereas Cas9 utilizes an HNH domain and a RuvC domain for cleavage.

[0101] A CRISPR Cas12a effector protein/domain useful with this invention may be any known or later identified Cas12a polypeptide (previously known as Cpf1) (see, e.g., U.S. Pat. No. 9,790,490, which is incorporated by reference for its disclosures of Cpf1 (Cas12a) sequences). The term “Cas12a”, “Cas12a polypeptide” or “Cas12a domain” refers to an RNA-guided nuclease comprising a Cas12a polypeptide, or a fragment thereof, which comprises the guide nucleic acid binding domain of Cas12a and/or an active, inactive, or partially active DNA cleavage domain of Cas12a. In some embodiments, a Cas12a useful with the invention may comprise a mutation in the nuclease active site (e.g., RuvC site of the Cas12a domain). A Cas12a domain or Cas12a polypeptide having a mutation in its nuclease active site, and therefore, no longer comprising nuclease activity, is commonly referred to as deadCas12a (e.g., dCas12a). In some embodiments, a Cas12a domain or Cas12a polypeptide having a mutation in its nuclease active site may have impaired activity, e.g., may have nickase activity.

[0102] In some embodiments, a CRISPR-Cas effector protein may be optimized for expression in an organism, for example, in an animal (e.g., a mammal such as a human), a plant, a fungus, an archaeon, or a bacterium. In some embodiments, a CRISPR-Cas effector protein (e.g., Cas12a polypeptide/domain or a Cas9 polypeptide/domain) may be optimized for expression in a plant.

[0103] Any deaminase domain/polypeptide useful for base editing may be used with this invention. A “cytosine deaminase” and “cytidine deaminase” as used herein refer to a polypeptide or domain thereof that catalyzes or is capable of catalyzing cytosine deamination in that the polypeptide or domain catalyzes or is capable of catalyzing the removal of an amine group from a cytosine base. Thus, a cytosine deaminase may result in conversion of cystosine to a thymidine (through a uracil intermediate), causing a C to T conversion, or a G to A conversion in the complementary strand in the genome. Thus, in some embodiments, the cytosine deaminase encoded by the polynucleotide of the invention generates a C→T conversion in the sense (e.g., “+”; template) strand of the target nucleic acid or a G→A conversion in antisense (e.g., “−”, complementary) strand of the target nucleic acid. In some embodiments, a cytosine deaminase encoded by a polynucleotide of the invention generates a C to T, G, or A conversion in the complementary strand in the genome.

[0104] A cytosine deaminase useful with this invention may be any known or later identified cytosine deaminase from any organism (see, e.g., U.S. Pat. No. 10,167,457 and Thuronyi et al. Nat. Biotechnol. 37:1070-1079 (2019), each of which is incorporated by reference herein for its disclosure of cytosine deaminases). Cytosine deaminases can catalyze the hydrolytic deamination of cytidine or deoxycytidine to uridine or deoxyuridine, respectively. Thus, in some embodiments, a deaminase or deaminase domain useful with this invention may be a cytidine deaminase domain, catalyzing the hydrolytic deamination of cytosine to uracil. In some embodiments, a cytosine deaminase may be a variant of a naturally-occurring cytosine deaminase, including, but not limited to, a primate (e.g., a human, monkey, chimpanzee, gorilla), a dog, a cow, a rat or a mouse. Thus, in some embodiments, a cytosine deaminase useful with the invention may be about 70% to about 100% identical to a wild-type cytosine deaminase (e.g., about 70%, 71%, 72%, 73%, 74%, 75%, 76%, 77%, 78%, 79%, 80%, 81%, 82%, 83%, 84%, 85%, 86%, 87%, 88%, 89%, 90%, 91%, 92%, 93%, 94%, 95%, 96%, 97%, 98%, 99%, or 100% identical, and any range or value therein, to a naturally occurring cytosine deaminase).

[0105] In some embodiments, a cytosine deaminase useful with the invention may be an apolipoprotein B mRNA-editing complex (APOBEC) family deaminase. In some embodiments, the cytosine deaminase may be an APOBEC1 deaminase, an APOBEC2 deaminase, an APOBEC3A deaminase, an APOBEC3B deaminase, an APOBEC3C deaminase, an APOBEC3D deaminase, an APOBEC3F deaminase, an APOBEC3G deaminase, an APOBEC3H deaminase, an APOBEC4 deaminase, a human activation induced deaminase (hAID), an rAPOBEC1, FERNY, and/or a CDA1, optionally a pmCDA1, an atCDA1 (e.g., At2g19570), and evolved versions of the same. Evolved deaminases are disclosed in, for example, U.S. Pat. No. 10,113,163, Gaudelli et al. Nature 551(7681):464-471 (2017)) and Thuronyi et al. (Nature Biotechnology 37: 1070-1079 (2019)), each of which are incorporated by reference herein for their disclosure of deaminases and evolved deaminases. In some embodiments, the cytosine deaminase may be an APOBEC1 deaminase having the amino acid sequence of SEQ ID NO:36. In some embodiments, the cytosine deaminase may be an APOBEC3A deaminase having the amino acid sequence of SEQ ID NO:37. In some embodiments, the cytosine deaminase may be an CDA1 deaminase, optionally a CDA1 having the amino acid sequence of SEQ ID NO:38. In some embodiments, the cytosine deaminase may be a FERNY deaminase, optionally a FERNY having the amino acid sequence of SEQ ID NO:39. In some embodiments, the cytosine deaminase may be a rAPOBEC1 deaminase, optionally a rAPOBEC1 deaminase having the amino acid sequence of SEQ ID NO:40. In some embodiments, the cytosine deaminase may be a hAID deaminase, optionally a hAID having the amino acid sequence of SEQ ID NO:41 or SEQ ID NO:42. In some embodiments, a cytosine deaminase useful with the invention may be about 70% to about 100% identical (e.g., 70%, 71%, 72%, 73%, 74%, 75%, 76%, 77%, 78%, 79%, 80%, 81%, 82%, 83%, 84%, 85%, 86%, 87%, 88%, 89%, 90%, 91%, 92%, 93%, 94%, 95%, 96%, 97%, 98%, 99%, 99.5% or 100% identical) to the amino acid sequence of a naturally occurring cytosine deaminase (e.g., “evolved deaminases”) (see, e.g., SEQ ID NO:43, SEQ ID NO:44, SEQ ID NO:45). In some embodiments, a cytosine deaminase useful with the invention may be about 70% to about 99.5% identical (e.g., about 70%, 71%, 72%, 73%, 74%, 75%, 76%, 77%, 78%, 79%, 80%, 81%, 82%, 83%, 84%, 85%, 86%, 87%, 88%, 89%, 90%, 91%, 92%, 93%, 94%, 95%, 96%, 97%, 98%, 99%, or 99.5% identical) to the amino acid sequence of any one of SEQ ID NOs:36-45 (e.g., at least 80%, at least 85%, at least 90%, at least 92%, at least 95%, at least 96%, at least 97%, at least 98%, at least 99%, or at least 99.5% identical to the amino acid sequence of any one of SEQ ID NOs: 36-45). In some embodiments, a polynucleotide encoding a cytosine deaminase may be codon optimized for expression in a plant and the codon optimized polypeptide may be about 70% to 99.5% identical to the reference polynucleotide.

[0106] An “adenine deaminase” and “adenosine deaminase” as used herein refer to a polypeptide or domain thereof that catalyzes or is capable of catalyzing the hydrolytic deamination (e.g., removal of an amine group from adenine) of adenine or adenosine. In some embodiments, an adenine deaminase may catalyze the hydrolytic deamination of adenosine or deoxyadenosine to inosine or deoxyinosine, respectively. In some embodiments, the adenosine deaminase may catalyze the hydrolytic deamination of adenine or adenosine in DNA. In some embodiments, an adenine deaminase encoded by a nucleic acid construct of the invention may generate an A→G conversion in the sense (e.g., “+”; template) strand of the target nucleic acid or a T→C conversion in the antisense (e.g., “−”, complementary) strand of the target nucleic acid. An adenine deaminase useful with this invention may be any known or later identified adenine deaminase from any organism (see, e.g., U.S. Pat. No. 10,113,163, which is incorporated by reference herein for its disclosure of adenine deaminases).

[0107] In some embodiments, an adenosine deaminase may be a variant of a naturally-occurring adenine deaminase. Thus, in some embodiments, an adenosine deaminase may be about 70% to 100% identical to a wild-type adenine deaminase (e.g., about 70%, 71%, 72%, 73%, 74%, 75%, 76%, 77%, 78%, 79%, 80%, 81%, 82%, 83%, 84%, 85%, 86%, 87%, 88%, 89%, 90%, 91%, 92%, 93%, 94%, 95%, 96%, 97%, 98%, 99%, or 100% identical, and any range or value therein, to a naturally occurring adenine deaminase). In some embodiments, the deaminase or deaminase does not occur in nature and may be referred to as an engineered, mutated or evolved adenosine deaminase. Thus, for example, an engineered, mutated or evolved adenine deaminase polypeptide or an adenine deaminase domain may be about 70% to 99.9% identical to a naturally occurring adenine deaminase polypeptide/domain (e.g., about 70%, 71%, 72%, 73%, 74%, 75%, 76%, 77%, 78%, 79%, 80%, 81%, 82%, 83%, 84%, 85%, 86%, 87%, 88%, 89%, 90%, 91%, 92%, 93%, 94%, 95%, 96%, 97%, 98%, 99%, 99.1%, 99.2%, 99.3%, 99.4%, 99.5%, 99.6%, 99.7%, 99.8% or 99.9% identical, and any range or value therein, to a naturally occurring adenine deaminase polypeptide or adenine deaminase domain). In some embodiments, the adenosine deaminase may be from a bacterium, (e.g., Escherichia coli, Staphylococcus aureus, Haemophilus influenzae, Caulobacter crescentus, and the like). In some embodiments, a polynucleotide encoding an adenine deaminase polypeptide/domain may be codon optimized for expression in a plant.

[0108] In some embodiments, an adenine deaminase domain may be a wild-type tRNA-specific adenosine deaminase domain, e.g., a tRNA-specific adenosine deaminase (TadA) and/or a mutated/evolved adenosine deaminase domain, e.g., mutated/evolved tRNA-specific adenosine deaminase domain (TadA*). In some embodiments, a TadA domain may be from E. coli. In some embodiments, the TadA may be modified, e.g., truncated, missing one or more N-terminal and/or C-terminal amino acids relative to a full-length TadA (e.g., 1, 2, 3, 4, 5, 6, 7, 8, 9, 10, 11, 12, 13, 14, 15, 6, 17, 18, 19, or 20 N-terminal and/or C terminal amino acid residues may be missing relative to a full length TadA. In some embodiments, a TadA polypeptide or TadA domain does not comprise an N-terminal methionine. In some embodiments, a TadA polypeptide or TadA domain does not comprise an N-terminal methionine. In some embodiments, a wild-type E. coli TadA comprises the amino acid sequence of SEQ ID NO:46. In some embodiments, a mutated/evolved E. coli TadA* comprises the amino acid sequence of SEQ ID NOs:47-50 (e.g., SEQ ID NOs: 47, 48, 49, or 50). In some embodiments, a polynucleotide encoding a TadA/TadA* may be codon optimized for expression in a plant. In some embodiments, an adenine deaminase may comprise all or a portion of an amino acid sequence of any one of SEQ ID NOs:51-56. In some embodiments, an adenine deaminase may comprise all or a portion of an amino acid sequence of any one of SEQ ID NOs:46-56.

[0109] The nucleic acid constructs of the invention comprising a CRISPR-Cas effector protein or a fusion protein thereof may be used in combination with a guide nucleic acid (e.g., guide RNA (gRNA), CRISPR array, CRISPR RNA, crRNA), designed to function with the encoded CRISPR-Cas effector protein or domain thereof, to modify a target nucleic acid. A guide nucleic acid useful with this invention may comprise at least one spacer sequence and at least one repeat sequence. The guide nucleic acid is capable of forming a complex with the CRISPR-Cas nuclease domain encoded and expressed by a nucleic acid construct of the invention and the spacer sequence is capable of hybridizing to a target nucleic acid, thereby guiding the complex to the target nucleic acid, wherein the target nucleic acid may be modified (e.g., cleaved or edited) and/or modulated (e.g., modulating transcription) by a deaminase (e.g., a cytosine deaminase and/or adenine deaminase, optionally present in and/or recruited to the complex).

[0110] As an example, a nucleic acid construct encoding a Cas9 domain linked to a cytosine deaminase domain (e.g., to provide a fusion protein) may be used in combination with a Cas9 guide nucleic acid to modify a target nucleic acid, wherein the cytosine deaminase domain of the fusion protein deaminates a cytosine base in the target nucleic acid, thereby modifying the target nucleic acid. In a further example, a nucleic acid construct encoding a Cas9 domain linked to an adenine deaminase domain (e.g., to provide a fusion protein) may be used in combination with a Cas9 guide nucleic acid to modify a target nucleic acid, wherein the adenine deaminase domain of the fusion protein deaminates an adenosine base in the target nucleic acid, thereby modifying the target nucleic acid. In some embodiments, a CRISPR-Cas effector protein (e.g., Cas9) is not fused to a cytosine deaminase and/or adenine deaminase, and the cytosine deaminase and/or adenine deaminase may be recruited to the CRISPR-Cas effector protein.

[0111] Likewise, a nucleic acid construct encoding a Cas12a domain (or other selected CRISPR-Cas nuclease, e.g., C2c1, C2c3, Cas12b, Cas12c, Cas12d, Cas12e, Cas13a, Cas13b, Cas13c, Cas13d, Casl, CaslB, Cas2, Cas3, Cas3′, Cas3″, Cas4, Cas5, Cas6, Cas7, Cas8, Cas9 (also known as Csnl and Csx12), Cas10, Csyl, Csy2, Csy3, Csel, Cse2, Cscl, Csc2, Csa5, Csn2, Csm2, Csm3, Csm4, Csm5, Csm6, Cmrl, Cmr3, Cmr4, Cmr5, Cmr6, Csbl, Csb2, Csb3, Csx17, Csx14, Csx10, Csx16, CsaX, Csx3, Csxl, Csx15, Csfl, Csf2, Csf3, Csf4 (dinG), and/or Csf5) may be linked to a cytosine deaminase domain or adenine deaminase domain (e.g., to provide fusion protein) and may be used in combination with a Cas12a guide nucleic acid (or the guide nucleic acid for the other selected CRISPR-Cas nuclease) to modify a target nucleic acid, wherein the cytosine deaminase domain or adenine deaminase domain of the fusion protein deaminates a cytosine base or adenosine base, respectively, in the target nucleic acid, thereby modifying the target nucleic acid.

[0112] A “guide nucleic acid,” “guide RNA,” “gRNA,” “CRISPR RNA/DNA” “crRNA” or “crDNA” as used herein means a nucleic acid that comprises at least one spacer sequence, which is complementary to (and hybridizes to) a target nucleic acid (e.g., a target DNA and/or protospacer), and at least one repeat sequence (e.g., a repeat of a Type V Cas12a CRISPR-Cas system, or a fragment or portion thereof, a repeat of a Type II Cas9 CRISPR-Cas system, or fragment thereof; a repeat of a Type V C2c1 CRISPR Cas system, or a fragment thereof, a repeat of a CRISPR-Cas system of, for example, C2c3, Cas12a (also referred to as Cpf1), Cas12b, Cas12c, Cas12d, Cas12e, Cas13a, Cas13b, Cas13c, Cas13d, Casl, CaslB, Cas2, Cas3, Cas3′, Cas3″, Cas4, Cas5, Cas6, Cas7, Cas8, Cas9 (also known as Csnl and Csx12), Cas10, Csyl, Csy2, Csy3, Csel, Cse2, Cscl, Csc2, Csa5, Csn2, Csm2, Csm3, Csm4, Csm5, Csm6, Cmrl, Cmr3, Cmr4, Cmr5, Cmr6, Csbl, Csb2, Csb3, Csx17, Csx14, Csx10, Csx16, CsaX, Csx3, Csxl, Csx15, Csfl, Csf2, Csf3, Csf4 (dinG), and/or Csf5, or a fragment thereof), wherein the repeat sequence may be linked to the 5′ end and/or the 3′ end of the spacer sequence. In some embodiments, the guide nucleic acid comprises DNA. In some embodiments, the guide nucleic acid comprises RNA (e.g., is a guide RNA). The design of a gRNA of this invention may be based on a Type I, Type II, Type III, Type IV, Type V, or Type VI CRISPR-Cas system.

[0113] In some embodiments, a Cas12a gRNA may comprise, from 5′ to 3′, a repeat sequence (full length or portion thereof (“handle”); e.g., pseudoknot-like structure) and a spacer sequence.

[0114] In some embodiments, a guide nucleic acid may comprise more than one repeat sequence-spacer sequence (e.g., 2, 3, 4, 5, 6, 7, 8, 9, 10, or more repeat-spacer sequences) (e.g., repeat-spacer-repeat, e.g., repeat-spacer-repeat-spacer-repeat-spacer-repeat-spacer-repeat-spacer, and the like). The guide nucleic acids of this invention are synthetic, human-made and not found in nature. A gRNA can be quite long and may be used as an aptamer (like in the MS2 recruitment strategy) or other RNA structures hanging off the spacer.

[0115] A “repeat sequence” as used herein, refers to, for example, any repeat sequence of a wild-type CRISPR Cas locus (e.g., a Cas9 locus, a Cas12a locus, a C2c1 locus, etc.) or a repeat sequence of a synthetic crRNA that is functional with the CRISPR-Cas effector protein encoded by the nucleic acid constructs of the invention. A repeat sequence useful with this invention can be any known or later identified repeat sequence of a CRISPR-Cas locus (e.g., Type I, Type II, Type III, Type IV, Type V or Type VI) or it can be a synthetic repeat designed to function in a Type I, II, III, IV, V or VI CRISPR-Cas system. A repeat sequence may comprise a hairpin structure and/or a stem loop structure. In some embodiments, a repeat sequence may form a pseudoknot-like structure at its 5′ end (i.e., “handle”). Thus, in some embodiments, a repeat sequence can be identical to or substantially identical to a repeat sequence from wild-type Type I CRISPR-Cas loci, Type II, CRISPR-Cas loci, Type III, CRISPR-Cas loci, Type IV CRISPR-Cas loci, Type V CRISPR-Cas loci and/or Type VI CRISPR-Cas loci. A repeat sequence from a wild-type CRISPR-Cas locus may be determined through established algorithms, such as using the CRISPRfinder offered through CRISPRdb (see, Grissa et al. Nucleic Acids Res. 35(Web Server issue):W52-7). In some embodiments, a repeat sequence or portion thereof is linked at its 3′ end to the 5′ end of a spacer sequence, thereby forming a repeat-spacer sequence (e.g., guide nucleic acid, guide RNA/DNA, crRNA, crDNA).

[0116] In some embodiments, a repeat sequence comprises, consists essentially of, or consists of at least 10 nucleotides depending on the particular repeat and whether the guide nucleic acid comprising the repeat is processed or unprocessed (e.g., about 10, 11, 12, 13, 14, 15, 16, 17, 18, 19, 20, 21, 22, 23, 24, 25, 26, 27, 28, 29, 30, 31, 32, 33, 34, 35, 36, 37, 38, 39, 40, 41, 42, 43, 44, 45, 46, 47, 48, 49, 50 to 100 or more nucleotides, or any range or value therein; e.g., about). In some embodiments, a repeat sequence comprises, consists essentially of, or consists of about 10 to about 20, about 10 to about 30, about 10 to about 45, about 10 to about 50, about 15 to about 30, about 15 to about 40, about 15 to about 45, about 15 to about 50, about 20 to about 30, about 20 to about 40, about 20 to about 50, about 30 to about 40, about 40 to about 80, about 50 to about 100 or more nucleotides.

[0117] A repeat sequence linked to the 5′ end of a spacer sequence can comprise a portion of a repeat sequence (e.g., 5, 6, 7, 8, 9, 10, 11, 12, 13, 14, 15, 16, 17, 18, 19, 20, 21, 22, 23, 24, 25, 26, 27, 28, 29, 30, 31, 32, 33, 34, 35 or more contiguous nucleotides of a wild-type repeat sequence). In some embodiments, a portion of a repeat sequence linked to the 5′ end of a spacer sequence can be about five to about ten consecutive nucleotides in length (e.g., about 5, 6, 7, 8, 9, 10 nucleotides) and have at least 90% sequence identity (e.g., at least about 90%, 91%, 92%, 93%, 94%, 95%, 96%, 97%, 98%, 99%, or more) to the same region (e.g., 5′ end) of a wild-type CRISPR Cas repeat nucleotide sequence. In some embodiments, a portion of a repeat sequence may comprise a pseudoknot-like structure at its 5′ end (e.g., “handle”).

[0118] A “spacer sequence” or “spacer” as used herein refer to a nucleotide sequence that is complementary to a target nucleic acid (e.g., a target DNA and/or a protospacer). In some embodiments, there may be two or more (e.g., 2, 3, 4, or more) different target nucleic acids and one, two, or more (e.g., 1, 2, 3, 4, or more) different spacers for the two or more different target nucleic acids. A single spacer may be configured to hybridize and/or bind to two or more different nucleic acids, or two or more different spacers may have a different sequence and/or each may be configured to hybridize and/or bind to a different nucleic acid. The spacer sequence can be fully complementary or substantially complementary (e.g., at least about 70% complementary (e.g., about 70%, 71%, 72%, 73%, 74%, 75%, 76%, 77%, 78%, 79%, 80%, 81%, 82%, 83%, 84%, 85%, 86%, 87%, 88%, 89%, 90%, 91%, 92%, 93%, 94%, 95%, 96%, 97%, 98%, 99%, or more)) to a target nucleic acid such as to a target nucleic acid that it is intended to bind. Thus, in some embodiments, the spacer sequence can have one, two, three, four, five, or more mismatches as compared to the target nucleic acid, which mismatches can be contiguous or noncontiguous. In some embodiments, the spacer sequence can have about 70% complementarity to a target nucleic acid. In other embodiments, the spacer nucleotide sequence can have about 80% complementarity to a target nucleic acid. In still other embodiments, the spacer nucleotide sequence can have about 85%, 90%, 95%, 96%, 97%, 98%, 99% or 99.5% complementarity, and the like, to a target nucleic acid (protospacer). In some embodiments, the spacer sequence is 100% complementary to a target nucleic acid. A spacer sequence may have a length from about 13 nucleotides to about 30 nucleotides (e.g., 13, 14, 15, 16, 17, 18, 19, 20, 21, 22, 23, 24, 25, 26, 27, 28, 29, or 30 nucleotides, or any range or value therein). Thus, in some embodiments, a spacer sequence may have complete complementarity or substantial complementarity over a target nucleic acid (e.g., protospacer) that is at least about 13 nucleotides to about 30 nucleotides in length. In some embodiments, the spacer is about 20 nucleotides in length. In some embodiments, the spacer is about 21, 22, or 23 nucleotides in length.

[0119] In some embodiments, the 5′ region of a spacer sequence of a guide nucleic acid may be fully complementary to a target nucleic acid, while the 3′ region of the spacer may be substantially complementary to the target nucleic acid (such as for a spacer in a Type V CRISPR-Cas system), or the 3′ region of a spacer sequence of a guide nucleic acid may be fully complementary to a target nucleic acid, while the 5′ region of the spacer may be substantially complementary to the target nucleic acid (such as for a spacer in a Type II CRISPR-Cas system), and therefore, the overall complementarity of the spacer sequence to the target nucleic acid may be less than 100%. Thus, for example, in a guide nucleic acid for a Type V CRISPR-Cas system, the first 1, 2, 3, 4, 5, 6, 7, 8, 9, 10 nucleotides in the 5′ region (i.e., seed region) of, for example, a 20 nucleotide spacer sequence may be 100% complementary to the target nucleic acid, while the remaining nucleotides in the 3′ region of the spacer sequence are substantially complementary (e.g., at least about 70% complementary) to the target nucleic acid. In some embodiments, the first 1 to 8 nucleotides (e.g., the first 1, 2, 3, 4, 5, 6, 7, 8, nucleotides, and any range therein) of the 5′ end of the spacer sequence may be 100% complementary to the target nucleic acid, while the remaining nucleotides in the 3′ region of the spacer sequence are substantially complementary (e.g., at least about 50% complementary (e.g., 50%, 55%, 60%, 65%, 70%, 71%, 72%, 73%, 74%, 75%, 76%, 77%, 78%, 79%, 80%, 81%, 82%, 83%, 84%, 85%, 86%, 87%, 88%, 89%, 90%, 91%, 92%, 93%, 94%, 95%, 96%, 97%, 98%, 99%, or more)) to the target nucleic acid.

[0120] As a further example, in a guide nucleic acid for a Type II CRISPR-Cas system, the first 1, 2, 3, 4, 5, 6, 7, 8, 9, 10 nucleotides in the 3′ region (i.e., seed region) of, for example, a 20 nucleotide spacer sequence may be 100% complementary to the target nucleic acid, while the remaining nucleotides in the 5′ region of the spacer sequence are substantially complementary (e.g., at least about 70% complementary) to the target nucleic acid. In some embodiments, the first 1 to 10 nucleotides (e.g., the first 1, 2, 3, 4, 5, 6, 7, 8, 9, 10 nucleotides, and any range therein) of the 3′ end of the spacer sequence may be 100% complementary to the target nucleic acid, while the remaining nucleotides in the 5′ region of the spacer sequence are substantially complementary (e.g., at least about 50% complementary (e.g., at least about 50%, 55%, 60%, 65%, 70%, 71%, 72%, 73%, 74%, 75%, 76%, 77%, 78%, 79%, 80%, 81%, 82%, 83%, 84%, 85%, 86%, 87%, 88%, 89%, 90%, 91%, 92%, 93%, 94%, 95%, 96%, 97%, 98%, 99%, or more or any range or value therein)) to the target nucleic acid.

In some embodiments, a seed region of a spacer may be about 8 to about 10 nucleotides in length, about 5 to about 6 nucleotides in length, or about 6 nucleotides in length.

[0121] As used herein, a “target nucleic acid”, “target DNA,” “target nucleotide sequence,” “target region,” or “target region in the genome” refer to a region of an organism's (e.g., a plant's) genome that comprises a sequence that is fully complementary (100% complementary) or substantially complementary (e.g., at least 70% complementary (e.g., 70%, 71%, 72%, 73%, 74%, 75%, 76%, 77%, 78%, 79%, 80%, 81%, 82%, 83%, 84%, 85%, 86%, 87%, 88%, 89%, 90%, 91%, 92%, 93%, 94%, 95%, 96%, 97%, 98%, 99%, or more)) to a spacer sequence in a guide nucleic acid as described herein. A target region useful for a CRISPR-Cas system may be located immediately 3′ (e.g., Type V CRISPR-Cas system) or immediately 5′ (e.g., Type II CRISPR-Cas system) to a PAM sequence in the genome of the organism (e.g., a plant genome or mammalian (e.g., human) genome). A target region may be selected from any region of at least 13 consecutive nucleotides (e.g., 13, 14, 15, 16, 17, 18, 19, 20, 21, 22, 23, 24, 25, 26, 27, 28, 29, 30 nucleotides, and the like) located immediately adjacent to a PAM sequence.

[0122] A “protospacer sequence” refers to the target double stranded DNA and specifically to the portion of the target nucleic acid that is fully or substantially complementary (and hybridizes) to the spacer sequence of the CRISPR repeat-spacer sequences (e.g., guide nucleic acids, CRISPR arrays, crRNAs).

[0123] In the case of Type V CRISPR-Cas (e.g., Cas12a) systems and Type II CRISPR-Cas (Cas9) systems, the protospacer sequence is flanked by (e.g., immediately adjacent to) a protospacer adjacent motif (PAM). For Type IV CRISPR-Cas systems, the PAM is located at the 5′ end on the non-target strand and at the 3′ end of the target strand (see below, as an example).

```
      5′-NNNNNNNNNNNNNNNNNNN-3′ RNA Spacer (SEQ ID NO: 57)
            ||||||||||||||||||||
3′AAANNNNNNNNNNNNNNNNNNN-5′ Target strand (SEQ ID NO: 58)
    ||||
5′TTTNNNNNNNNNNNNNNNNNNN-3′ Non-target strand (SEQ ID NO: 59)
```

[0124] In the case of Type II CRISPR-Cas (e.g., Cas9) systems, the PAM is located immediately 3′ of the target region. The PAM for Type I CRISPR-Cas systems is located 5′ of the target strand. There is no known PAM for Type III CRISPR-Cas systems. Makarova et al. describes the nomenclature for all the classes, types and subtypes of CRISPR systems (Nature Reviews Microbiology 13:722-736 (2015)). Guide structures and PAMs are described in by R. Barrangou (Genome Biol. 16:247 (2015)).

[0125] Canonical Cas12a PAMs are T rich. In some embodiments, a canonical Cas12a PAM sequence may be 5′-TTN, 5′-TTTN, or 5′-TTTV. In some embodiments, canonical Cas9 (e.g., S. pyogenes) PAMs may be 5′-NGG-3′. In some embodiments, non-canonical PAMs may be used but may be less efficient.

[0126] Additional PAM sequences may be determined by those skilled in the art through established experimental and computational approaches. Thus, for example, experimental approaches include targeting a sequence flanked by all possible nucleotide sequences and identifying sequence members that do not undergo targeting, such as through the transformation of target plasmid DNA (Esvelt et al. 2013. Nat. Methods 10:1116-1121; Jiang et al. 2013. Nat. Biotechnol. 31:233-239). In some aspects, a computational approach can include performing BLAST searches of natural spacers to identify the original target DNA sequences in bacteriophages or plasmids and aligning these sequences to determine conserved sequences adjacent to the target sequence (Briner and Barrangou. 2014. Appl. Environ. Microbiol. 80:994-1001; Mojica et al. 2009. Microbiology 155:733-740).

[0127] In some embodiments, the present invention provides expression cassettes and/or vectors comprising a nucleic acid construct of the invention (e.g., one or more components of an editing system of the invention). In some embodiments, expression cassettes and/or vectors comprising the nucleic acid constructs of the invention and/or one or more guide nucleic acids may be provided. In some embodiments, a nucleic acid construct of the invention encoding at least a portion of an editing system (e.g., a construct comprising a CRISPR-Cas effector protein, a guide nucleic acid and/or a deaminase) may be comprised on the same or on a separate expression cassette or vector from that comprising one or more guide nucleic acid(s). When the nucleic acid construct encoding at least a portion of an editing system is comprised on separate expression cassette(s) or vector(s) from that comprising the guide nucleic acid, a target nucleic acid may be contacted with (e.g., provided with) the expression cassette(s) or vector(s) encoding the at least a portion of an editing system in any order from one another and the guide nucleic acid, e.g., prior to, concurrently with, or after the expression cassette comprising the guide nucleic acid is provided (e.g., contacted with the target nucleic acid).

[0128] Provided according to embodiments of the present invention are methods of transforming a plant cell. In some embodiments, a method of transforming a plant cell comprises introducing a polynucleotide from an Agrobacterium rhizogenes strain into the plant cell to provide a transformed plant cell, thereby transforming the plant cell. The polynucleotide may be T-DNA from the Ti plasmid and/or Ri plasmid of the Agrobacterium rhizogenes strain. In some embodiments, the Ti plasmid comprises a non-Agrobacterium rhizogenes origin of replication (i.e., the Ti plasmid comprises an origin of replication that is not native to Agrobacterium rhizogenes). The origin of replication may be from a different Agrobacterium species such as, but not limited to, Agrobacterium tumefaciens. In some embodiments, the transformed plant cell is a transgenic plant cell. Introducing the polynucleotide from the Agrobacterium rhizogenes strain into the plant cell may comprise contacting the plant cell and the Agrobacterium rhizogenes strain. In some embodiments, the plant cell is infected with the Agrobacterium rhizogenes strain. Exemplary methods for introducing an Agrobacterium rhizogenes strain into a plant cell are known in the art and may be used in a method of the present invention. In some embodiments, a plant cell and/or an explant comprising a plant cell is contacted with an Agrobacterium rhizogenes strain, optionally the plant cell and/or explant may be contacted with a composition (e.g., a suspension and/or culture) comprising the Agrobacterium rhizogenes strain. In some embodiments, the plant cell and/or explant is cultured and/or cultivated with the Agrobacterium rhizogenes strain and/or a composition comprising the Agrobacterium rhizogenes strain. For example, a plant donor explant may be wounded with a surgical scalpel and contacted with and/or provided in an Agrobacterium cell suspension, followed by sonication treatment (e.g., for about 1 minute to about 5 or 10 minutes) to create a micro-wounding on the explant tissue. A composition (e.g., a suspension) comprising Agrobacterium rhizogenes cells in a liquid medium may optionally include about 100 micromoles of acetosyringone. In some embodiments, the composition comprising Agrobacterium rhizogenes cells may have an optical density reading of 0.1 to 1.2 at 660 nm. A composition comprising Agrobacterium rhizogenes cells may be contacted to a plant cell (e.g., a plant cell of an explant such as during explant preparation by cutting using a surgical blade). In some embodiments, an explant is treated with sonication for about 1 minute to about 10 minutes when in contact with (e.g., when in) the Agrobacterium rhizogenes composition to introduce micro-wounding to the explant.

[0129] In some embodiments, a method of the present invention comprises introducing all or a portion of an editing system into a plant cell. In some embodiments, an editing system (e.g., an editing system including a CRISPR-Cas effector protein and a guide nucleic acid) is assembled in the form of a complex (e.g., a ribonucleoprotein) prior to being introduced into the plant cell and/or is assembled into the complex during and/or after introduction into the plant cell. For example, a method of the present invention may comprise forming a complex (e.g., a ribonucleoprotein) inside a plant cell after introducing the editing system and/or after introducing a polynucleotide encoding all or a portion of the editing system into the plant cell. Exemplary methods for introducing an editing system or a portion thereof into a plant cell are known in the art and may be used in a method of the present invention. In some embodiments, particle bombardment is used to introduce all or a portion of an editing system into a plant cell. In some embodiments, an Agrobacterium rhizogenes strain is used to introduce all or a portion of an editing system into a plant cell.

[0130] In some embodiments, the polynucleotide from the Agrobacterium rhizogenes strain that is introduced into the plant cell may encode for or comprise at least a portion of an editing system that is capable of modifying a target nucleic acid in the plant cell to provide a modified nucleic acid. In some embodiments, the Agrobacterium rhizogenes strain comprises a polynucleotide that encodes all or a portion of an editing system. For example, the Agrobacterium rhizogenes strain may comprise a polynucleotide that encodes a nucleic acid binding polypeptide (e.g., a CRISPR-Cas effector protein) and/or a deaminase and/or may include a guide nucleic acid, optionally wherein the nucleic acid binding polypeptide, deaminase and/or guide nucleic acid are present in the same or different polynucleotides. In some embodiments, the Agrobacterium rhizogenes strain includes a polynucleotide that comprises a guide nucleic acid, and optionally a nucleic acid binding polypeptide (e.g., a CRISPR-Cas effector protein) and/or a deaminase are separately introduced (e.g., using particle bombardment) into the plant cell. In some embodiments, the Agrobacterium rhizogenes strain includes a polynucleotide that encodes a ribonucleoprotein and/or a complex of an editing system. In some embodiments, the Agrobacterium rhizogenes strain includes a polynucleotide that codes for or comprises at least a portion (or all) of an editing system that forms a complex (e.g., a ribonucleoprotein) optionally inside a plant cell after being introduced into the plant cell.

[0131] A method of the present invention may introduce a polynucleotide from an Agrobacterium rhizogenes strain, a portion or all of an editing system and/or a polynucleotide encoding or comprising a portion or all of an editing system into a plant cell in one or more (e.g., 1, 2, 3, or more) introducing step(s). When there are two or more introducing steps, the two or more introducing steps may be performed separately and may be performed sequentially or concurrently.

[0132] In some embodiments, a polynucleotide from an Agrobacterium rhizogenes strain, a portion or all of an editing system and/or a polynucleotide encoding or comprising a portion or all of an editing system is/are introduced into a root-forming competent cell. A “root-forming competent cell” as used herein refers to a cell that has potential and/or capability to form a root upon being transformed. Exemplary root-forming competent cells include, but are not limited to, cambium layer cells in a plant stem. In some embodiments, the plant cell is a cell (e.g., a root-forming competent cell) in an explant such as, but not limited to, a shoot stem nodal explant, shoot tip explant, node explant, shoot node explant, leaf node explant, a shoot meristem explant, axillary shoot, an etiolated shoot, and/or any portion thereof. The explant may be a shoot node explant, optionally a young shoot node explant. A young shoot node explant may be derived and/or obtained from a shoot of a plant (e.g., greenhouse-grown donor plant) and may contain a fully expanded leaf and axillary meristem. In some embodiments, the explant is a shoot meristem explant. In some embodiments, the explant is an etiolated shoot. In some embodiments, the explant is a leaf node explant, optionally a young leaf node explant. In some embodiments, the explant is collected from a plant (e.g., a greenhouse-grown donor plant). In some embodiments, an explant is cultured in vitro to produce one or more axillary shoot(s) and an axillary shoot may be collected and/or contacted with an Agrobacterium rhizogenes strain, optionally wherein the axillary shoot is separated from rest of the explant and the separate axillary shoot is contacted with the Agrobacterium rhizogenes strain. In some embodiments, an explant that is contacted and/or infected with an Agrobacterium rhizogenes stain is a portion of an explant, optionally a portion of an explant that has been cultured in vitro (e.g., on MS agar medium) for a period of time, and the portion is not limited in size. In some embodiments, an explant is wounded and/or cut at one or more (e.g., 1, 2, 3, 4, 5 or more) locations and/or the explant is cut into two or more (e.g., 2, 3, 4, 5, or more) portions and the wounded and/or cut explant is contacted and/or infected with an Agrobacterium rhizogenes stain. A callus (e.g., a transgenic callus) may form at the cut site and/or wound of the explant that is contacted and/or infected with the Agrobacterium rhizogenes stain. A young leaf node is capable of forming a new shoot and leaf from its axillary meristem and is capable of forming a transgenic root upon infection with an Agrobacterium rhizogenes stain in vitro. In some embodiments, an introducing step of the present invention comprises contacting an Agrobacterium rhizogenes strain and an explant comprising a plant cell such that a polynucleotide of the Agrobacterium rhizogenes strain is introduced into the plant cell of the explant.

[0133] Embodiments of the present invention may use one or more (e.g., 1, 2, 3, 4, 5, or more) different types of explants as the donor tissues for A. rhizogenes-mediated transformation. An explant (e.g., a transformation donor explant tissue) may be a nodal tissue freshly collected from a greenhouse-grown plant, a pre-cultured nodal tissue prior to Agrobacterium infection, an etiolated seedling, or an axillary shoot derived from an in vitro cultured node tissue. During a co-culturing step and/or a step of contacting a cell of an explant with A. rhizogenes, A. rhizogenes cells may facilitate the transformation of one or more explant cell(s) (also referred to as transformation competent cells). During and/or after the co-cultivation step and/or contacting step, initiation and formation of a callus can occur at a wounding site (e.g., a cut site or location where the explant is/was cut) of the explant, and the callus may be a transgenic callus (e.g., one or more callus cell(s) include a modified nucleic acid). A transgenic callus may develop into a transgenic root, and hence a composite transgenic plant. In some embodiments, a callus tissue (e.g., a callus) is not collected or separated from the remainder of the explant prior to, during, and/or after the transformation and/or contacting step. In some embodiments, the callus tissue (e.g., a callus) is not collected or separated from the remainder of the explant at any point during the process.

[0134] Introducing a polynucleotide from an Agrobacterium rhizogenes strain into a plant cell may comprise concurrently introducing transfer DNA (T-DNA) from the tumor-inducing (Ti) plasmid and hairy root-inducing (Ri) plasmid of the Agrobacterium rhizogenes strain. In some embodiments, the T-DNA from the Ti plasmid and the T-DNA from the Ri plasmid are concurrently integrated into the genome of the plant cell to provide a transgenic plant cell. In some embodiments, T-DNA from the Ti plasmid of an Agrobacterium rhizogenes strain (e.g., a Ti plasmid comprising a non-Agrobacterium rhizogenes origin of replication) is introduced into a plant cell and encodes or comprises a polynucleotide of interest (e.g., a polynucleotide encoding or comprising all or a portion of an editing system and/or a reporter gene). In some embodiments, the Agrobacterium rhizogenes strain is a wild-type Agrobacterium rhizogenes strain optionally comprising a polynucleotide of interest and/or a reporter gene. In some embodiments, a method of the present invention produces a transgenic root that comprises T-DNA from the Ti plasmid of an Agrobacterium rhizogenes strain (e.g., a Ti plasmid comprising a non-Agrobacterium rhizogenes origin of replication) and a plant (e.g., a transgenic plant that is optionally an edited plant) may be produced from the transgenic root.

[0135] Exemplary Agrobacterium rhizogenes strains include, but are not limited to, Agrobacterium rhizogenes strain 1193, Agrobacterium rhizogenes strain Qual, Agrobacterium rhizogenes strain K599, Agrobacterium rhizogenes strain A4, and/or Agrobacterium rhizogenes strain MSU440. Agrobacterium rhizogenes strain MSU440 may also be referred to as Agrobacterium rhizogenes(str R) MSU440 Ri (agropine type). Agrobacterium rhizogenes strain MSU440 is accessible from the bank of microbes at the National Institute of Genetic Engineering and Biotechnology (NIGEB), Tehran, Iran and/or is commercially available as Cat. No. ACC-124 from Lifeasible, Suite 209, 17 Ramsey Road, Shirley, NY 11967, lifeasible.com/p/2719/msu440-electroporation-competent-cell/. In some embodiments, Agrobacterium rhizogenes strain MSU440 is provided by and/or obtained from the bank of microbes at the National Institute of Genetic Engineering and Biotechnology (NIGEB), Tehran, Iran and/or from Lifeasible, Suite 209, 17 Ramsey Road, Shirley, NY 11967, lifeasible.com/p/2719/msu440-electroporation-competent-cell/, as Cat. No. ACC-124. In some embodiments, the Agrobacterium rhizogenes strain is a disarmed Agrobacterium rhizogenes strain. A “disarmed Agrobacterium rhizogenes strain” as used herein refers to an Agrobacterium rhizogenes strain whose genome has been modified compared to its native sequence and/or structure so that introduction of a polynucleotide from the strain cannot cause and/or provide the hairy root phenotype in a plant cell expressing the polynucleotide. The hairy root phenotype is characterized by short internodes, wrinkled leaves, abundant roots with extensive lateral branching, and/or increased production certain metabolites (see Tepfer 1984 and Shen et al. 1988). In some embodiments, a disarmed Agrobacterium rhizogenes strain is provided by modifying (e.g., deleting) the T-DNA that contains the rol genes in a manner such that the hairy root phenotype is not provided when the strain infects a plant. In some embodiments, a disarmed Agrobacterium rhizogenes strain is provided by deleting at least a portion (or all) of the T-DNA that contains the rol genes so that the strain lacks the T-DNA and/or a functional rol gene. In some embodiments, a disarmed Agrobacterium rhizogenes strain is devoid of T-DNA in its hairy root-inducing (Ri) plasmid and the Ri plasmid comprises trans factors (e.g., vir genes). In some embodiments, both T-DNAs in the Ri plasmid pRIA4 have been removed in a disarmed Agrobacterium rhizogenes strain. In some embodiments, a disarmed Agrobacterium rhizogenes strain is devoid of a rol gene or lacks a functional rol gene (e.g., comprises a nonfuctional rol gene). Exemplary disarmed Agrobacterium rhizogenes strains include, but are not limited to, an Agrobacterium rhizogenes strain 1193, Agrobacterium rhizogenes strain Qual, Agrobacterium rhizogenes strain A4, Agrobacterium rhizogenes strain K599, and/or Agrobacterium rhizogenes strain MSU440 that is modified so that introduction of a polynucleotide from the strain cannot cause and/or provide the hairy root phenotype in a plant cell expressing the polynucleotide to thereby provide a disarmed Agrobacterium rhizogenes strain 1193, a disarmed Agrobacterium rhizogenes strain Qual, a disarmed Agrobacterium rhizogenes strain A4, a disarmed Agrobacterium rhizogenes strain K599 and/or a disarmed Agrobacterium rhizogenes strain MSU440, respectively. In some embodiments, a rol gene (e.g., a functional rol gene) may be present in an Agrobacterium rhizogenes strain and the rol gene may aid in root formation from a plant cell transformed (e.g., infected) with the Agrobacterium rhizogenes strain and/or stimulate plant growth.

[0136] In some embodiments, a disarmed Agrobacterium rhizogenes strain of the present invention comprises a deletion in the Ri plasmid, wherein the deletion is in a region of the MSU440 Ri plasmid from base pair 70,000 to base pair 130,000, with the base pair number of the MSU440 Ri plasmid beginning at the start of the origin of replication of the MSU440 Ri plasmid (i.e., the first nucleotide of the origin of replication is base pair 1), or an optimally aligned region thereto for a different Ri plasmid. In some embodiments, the deletion in the region of the MSU440 Ri plasmid or optimally aligned region thereto is a deletion of about 40,000 base pairs to about 60,000 base pairs. In some embodiments, the deletion in the region of the MSU440 Ri plasmid or optimally aligned region thereto is a deletion of about 50,000 base pairs. In some embodiments, the deletion in the region of the MSU440 Ri plasmid or optimally aligned region thereto is in a region having a sequence identity of about 70%, 75%, 80%, 85%, 90%, 95%, 96%, 97%, 98%, 99%, or 100% to SEQ ID NO:67. In some embodiments, the deletion in the region of the MSU440 Ri plasmid or optimally aligned region thereto has a sequence identity of about 70%, 75%, 80%, 85%, 90%, 95%, 96%, 97%, 98%, 99%, or 100% to SEQ ID NO:68 (i.e., the Ri plasmid of the disarmed Agrobacterium rhizogenes strain is devoid of a sequence having a sequence identity of about 70%, 75%, 80%, 85%, 90%, 95%, 96%, 97%, 98%, 99%, or more to SEQ ID NO:68). In some embodiments, the deletion is in the T-DNA of the Ri plasmid that comprises the rol gene for the MSU440 Ri plasmid or the different Ri plasmid.

[0137] In some embodiments, a disarmed Agrobacterium rhizogenes strain of the present invention is prepared from Agrobacterium rhizogenes strain MSU440 by deleting about 70%, 75%, 80%, 85%, 90%, 95%, 96%, 97%, 98%, 99%, or 100% of SEQ ID NO:67 in the Ri plasmid of the Agrobacterium rhizogenes strain MSU440. In some embodiments, a disarmed Agrobacterium rhizogenes strain of the present invention is prepared from Agrobacterium rhizogenes strain MSU440 by deleting about 70%, 75%, 80%, 85%, 90%, 95%, 96%, 97%, 98%, 99%, or 100% of SEQ ID NO:68 in the Ri plasmid of the Agrobacterium rhizogenes strain MSU440. In some embodiments, a disarmed Agrobacterium rhizogenes strain of the present invention is prepared from Agrobacterium rhizogenes strain MSU440, wherein the Ri plasmid of the Agrobacterium rhizogenes strain MSU440 has a sequence of SEQ ID NO:69, and the disarmed Agrobacterium rhizogenes strain is prepared by deleting about 70%, 75%, 80%, 85%, 90%, 95%, 96%, 97%, 98%, 99%, or 100% of SEQ ID NO:68 in the Ri plasmid of the Agrobacterium rhizogenes strain MSU440, to provide the disarmed Agrobacterium rhizogenes strain optionally having a Ri plasmid having a sequence having a sequence identity of about 70%, 75%, 80%, 85%, 90%, 95%, 96%, 97%, 98%, 99%, or 100% of SEQ ID NO:70.

[0138] A disarmed Agrobacterium rhizogenes strain of the present invention may comprise a Ri plasmid that is devoid of a functional rol gene. In some embodiments, the Ri plasmid of a disarmed Agrobacterium rhizogenes strain of the present invention is devoid of about 70%, 75%, 80%, 85%, 90%, 95%, 96%, 97%, 98%, 99%, or 100% of one or more of SEQ ID NOs:73-77 and/or devoid of about 70%, 75%, 80%, 85%, 90%, 95%, 96%, 97%, 98%, 99%, or 100% of a sequence encoding one or more of SEQ ID NO:78-82. In some embodiments, the Ri plasmid of a disarmed Agrobacterium rhizogenes strain of the present invention is devoid of a rol gene. In some embodiments, the Ri plasmid of a disarmed Agrobacterium rhizogenes strain of the present invention is devoid of the T-DNA that contains the rol gene. In some embodiments, the Ri plasmid of a disarmed Agrobacterium rhizogenes strain of the present invention is devoid of about 70%, 75%, 80%, 85%, 90%, 95%, 96%, 97%, 98%, 99%, or 100% of SEQ ID NO:71 and/or SEQ ID NO:72. In some embodiments, the Ri plasmid of a disarmed Agrobacterium rhizogenes strain of the present invention is devoid of T-DNA.

[0139] The Ri plasmid of a disarmed Agrobacterium rhizogenes strain of the present invention may comprise one or more trans factor(s) of the Ri plasmid of the MSU440 Ri plasmid or another Ri plasmid. In some embodiments, the Ri plasmid of a disarmed Agrobacterium rhizogenes strain comprises a vir gene of the MSU440 Ri plasmid or another Ri plasmid. In some embodiments, the Ri plasmid of a disarmed Agrobacterium rhizogenes strain of the present invention comprises an additional sequence compared to the MSU440 Ri plasmid or another Ri plasmid. The additional sequence may have a length of about 100, 500, 1,000, 1,500 or 2,000 base pairs to about 2,500, 3,000, or 3,500 base pairs. In some embodiments, the additional sequence comprises a nucleotide sequence that confers antibiotic resistance (e.g., an antibiotic resistance cassette such as a gentamicin resistance cassette).

[0140] In some embodiments, the Ri plasmid of a disarmed Agrobacterium rhizogenes strain of the present invention comprises a sequence having a sequence identity of about 70%, 75%, 80%, 85%, 90%, 95%, 96%, 97%, 98%, 99%, or 100% to SEQ ID NO:65 and/or a sequence having a sequence identity of about 70%, 75%, 80%, 85%, 90%, 95%, 96%, 97%, 98%, 99%, or 100% to SEQ ID NO:66. The Ri plasmid of a disarmed Agrobacterium rhizogenes strain of the present invention may comprise a sequence having a sequence identity of about 70%, 75%, 80%, 85%, 90%, 95%, 96%, 97%, 98%, 99%, or 100% to SEQ ID NO:64. In some embodiments, the Ri plasmid of a disarmed Agrobacterium rhizogenes strain of the present invention comprises a sequence having a sequence identity of about 70%, 75%, 80%, 85%, 90%, 95%, 96%, 97%, 98%, 99%, or 100% to SEQ ID NO:70. In some embodiments, a disarmed Agrobacterium rhizogenes strain of the present invention comprises a tumor-inducing (Ti) plasmid that comprises a non-Agrobacterium rhizogenes origin of replication, optionally wherein the Ti plasmid comprises an Agrobacterium tumefaciens origin of replication. In some embodiments, a disarmed Agrobacterium rhizogenes strain of the present invention is Agrobacterium rhizogenes strain DS101.1. In some embodiments, a disarmed Agrobacterium rhizogenes strain of the present invention is frozen and/or lyophilized.

[0141] In some embodiments, a plant cell is stably transformed with a polynucleotide from an Agrobacterium rhizogenes strain, a portion or all of an editing system and/or a polynucleotide encoding or comprising a portion or all of an editing system. In some embodiments, a polynucleotide (e.g., a polynucleotide from an Agrobacterium rhizogenes strain and/or that encodes or comprises a portion or all of an editing system) is stably expressed in a plant cell such that a transgenic plant cell is provided, and stable expression of the polynucleotide in the transgenic plant cell allows and/or provides for a target nucleic acid to be modified in the plant cell and thereby provides a modified nucleic acid.

[0142] In some embodiments, a plant cell is transiently transformed with a polynucleotide from an Agrobacterium rhizogenes strain, a portion or all of an editing system and/or a polynucleotide encoding or comprising a portion or all of an editing system. In some embodiments, a polynucleotide (e.g., a polynucleotide from an Agrobacterium rhizogenes strain and/or that encodes or comprises a portion or all of an editing system) is transiently expressed in the plant cell and transient expression of the polynucleotide in the plant cell allows and/or provides for a target nucleic acid to be modified in the plant cell and thereby provide a modified nucleic acid.

[0143] A callus and/or root may be formed from a transformed plant cell (e.g., a plant cell comprising a polynucleotide from an Agrobacterium rhizogenes strain, a portion or all of an editing system and/or a polynucleotide encoding or comprising a portion or all of an editing system). In some embodiments, a transformed plant cell comprises a modified nucleic acid. In some embodiments, the callus is a transgenic callus that optionally comprises the modified nucleic acid. A method of the present invention may comprise producing a root (e.g., a hairy root) from the transformed plant cell and the root optionally includes the modified nucleic acid. A “hairy root” as used herein refers to a root having the hairy phenotype that is formed following introduction and expression of the Ri plasmid T-DNA from an Agrobacterium rhizogenes strain in a plant cell. In some embodiments, a method of the present invention comprises inducing root formation (e.g., a hairy root formation) from a transformed plant cell (that optionally comprises a modified nucleic acid) in the absence of an exogenous plant growth substance (e.g., plant growth regulators and/or hormones), a selection agent (e.g., a selection agent for selecting transformed and/or transgenic cells), and/or a root inducing phytohormone. In some embodiments, little or no auxin supplementation is provided to produce a root from the transformed plant cell. In some embodiments, auxin supplementation and/or a selection agent is provided to produce a root from the transformed plant cell. A root (e.g., hairy and/or edited root) may be produced de novo from an explant in that a root may emerge directly from an excised leaf, a stem segment, a nodal meristem, and/or leaf petiole. In some embodiments, a root (e.g., a hairy and/or edited root) may be derived from a shoot tip of an explant. In some embodiments, a method of the present invention comprises converting a shoot meristem of an explant into a root (e.g., a hairy and/or edited root).

[0144] In some embodiments, a callus (e.g., a transgenic and/or edited callus) and/or a root (e.g., a transgenic and/or edited root) may be produced according to a method of the present invention at about 2 or 3 weeks to about 4, 5, or 6 weeks from the time a plant cell was initially contacted with an Agrobacterium rhizogenes strain and/or from the time a polynucleotide from the Agrobacterium rhizogenes strain was introduced into the plant cell. In some embodiments, a callus (e.g., a transgenic and/or edited callus) and/or a root (e.g., a transgenic and/or edited root) may be produced according to a method of the present invention at about 2, 3, 4, 5, or 6 weeks from the time a plant cell was initially contacted with an Agrobacterium rhizogenes strain and/or from the time a polynucleotide from the Agrobacterium rhizogenes strain was introduced into the plant cell.

[0145] In some embodiments, a method of the present invention provides a transgenic and/or edited plantlet in reduced time compared to a conventional transformation and/or regeneration method (e.g., a method that involves shoot induction from an explant and/or shoot development and root induction to provide a plantlet). In some embodiments, the plantlet provided according to embodiments of the present invention is transgenic and edited, optionally the transgenic and edited plantlet may be a composite plantlet that is edited. In some embodiments, the plantlet provided according to embodiments of the present invention is transgene free and edited (i.e., an edited plantlet that is transgene free). A method of the present invention may provide a transgenic plantlet and/or edited plantlet in about 2 or 3 weeks to about 4, 5, or 6 weeks from the time a plant cell was initially contacted with an Agrobacterium rhizogenes strain to thereby form the plantlet and/or from the time a polynucleotide from the Agrobacterium rhizogenes strain was introduced into the plant cell to thereby form the plantlet. In some embodiments, a transgenic plantlet and/or edited plantlet may be produced according to a method of the present invention at about 2, 3, 4, 5, or 6 weeks from the time a plant cell was initially contacted with an Agrobacterium rhizogenes strain to thereby form the plantlet and/or from the time a polynucleotide from the Agrobacterium rhizogenes strain was introduced into the plant cell to thereby form the plantlet.

[0146] In some embodiments, a method of the present invention comprises producing a transgenic root from a transformed plant cell as described herein. The transgenic root may be a transgenic hairy root and/or may comprise a modified nucleic acid. In some embodiments, the transgenic root comprises a polynucleotide from an Agrobacterium rhizogenes strain, a portion or all of an editing system and/or a polynucleotide encoding or comprising a portion or all of an editing system. In some embodiments, the transgenic root comprises T-DNA from the tumor-inducing (Ti) plasmid of the Agrobacterium rhizogenes strain.

[0147] A shoot may be produced from a root produced according to embodiments of the present invention. In some embodiments, the shoot is a transgenic shoot (e.g., comprises a polynucleotide from an Agrobacterium rhizogenes strain, a portion or all of an editing system and/or a polynucleotide encoding or comprising a portion or all of an editing system) that optionally comprise cells including a modified nucleic acid. In some embodiments, the shoot comprises cells including a modified nucleic acid. In some embodiments, the shoot is transgene-free and comprises cells including a modified nucleic acid.

[0148] A method of the present invention may comprise producing a plant from a root and/or shoot produced according to embodiments of the present invention. In some embodiments, the plant is transgenic (e.g., comprises a polynucleotide from an Agrobacterium rhizogenes strain, a portion or all of an editing system and/or a polynucleotide encoding or comprising a portion or all of an editing system) and/or the plant comprises cells including a modified nucleic acid (i.e., is an edited plant). In some embodiments, the plant is a transgenic plant that is produced from a transgenic root (e.g., a young or mature transgenic root). In some embodiments, a transgenic plant is fully transgenic in that all cells of the plant include an introduced nucleic acid. In some embodiments, the plant is a transgene-free plant that comprises cells including a modified nucleic acid. A transgene-free, edited plant may be produced from a root comprising cells including the modified nucleic acid. In some embodiments, the plant is a transgenic composite plant. A “transgenic composite plant,” “composite transgenic plant,” or “composite plant” as used herein refer to a plant that includes a portion (e.g., one or more root(s)) that is transgenic and another portion that is non-transgenic. In some embodiments, a transgenic composite plant includes transgenic roots and one or more other portion(s) of the plant are non-transgenic. In some embodiments, a transgenic composite plant includes transgenic roots and optionally non-transgenic aerial tissue and/or non-transgenic roots. In some embodiments, a transgenic composite plant is produced from an explant (e.g., a node explant) following introducing a polynucleotide from and/or upon infection by an Agrobacterium rhizogenes strain. In some embodiments, a transgenic plant is produced from a transgenic root and/or transgenic shoot, and the transgenic plant may comprise cells including a modified nucleic acid. In some embodiments, a composite plant is produced from an explant and optionally from a shoot and/or root from the explant, optionally with the shoot being non-transgenic and devoid of cells including a modified nucleic acid (i.e., the shoot is not edited) and the root being transgenic and comprising cells including a modified nucleic acid (i.e., the root is edited). A progeny plant from a composite plant may comprise cells that include a modified nucleic acid; thus, the progeny plant from the composite plant may be an edited plant.

[0149] A method of the present invention may comprise screening for a polynucleotide introduced by an Agrobacterium rhizogenes strain, a modified nucleic acid, and/or a given phenotype. In some embodiments, a callus and/or root is screened for a polynucleotide introduced by an Agrobacterium rhizogenes strain, a modified nucleic acid, and/or a given phenotype. In some embodiments, a progeny plant is screened for a polynucleotide introduced by an Agrobacterium rhizogenes strain, a modified nucleic acid, and/or a given phenotype. Screening may comprise phenotyping. In some embodiments, a method of the present invention comprises performing molecular screening such as molecular screening on a callus, root, and/or progeny plant. The molecular screening may be performed before and/or after phenotyping. Methods of screening are known to those of skill in the art and include, but are not limited to, evaluating gene expression levels such as by using quantitative PCR (qPCT) and/or by physical and/or visual evaluation of the phenotype.

[0150] In some embodiments, a method of the present invention comprises screening a root and/or callus for cells comprising a modified nucleic acid such as a nucleic acid that is modified responsive to introducing a polynucleotide from an Agrobacterium rhizogenes strain and/or an editing system. In some embodiments, the screened root and/or callus includes a modified nucleic acid, and a plant may be produced from the edited root and/or edited callus. For example, a segment of a root (e.g., a hairy root) may be screened and the remainder of the root may be used to produce a plant (e.g., an edited and/or transgenic plant) from the root. In some embodiments, the plant produced from the edited root and/or edited callus may be an edited plant (i.e., the plant comprises cells including a modified nucleic acid). The produced plant may be a transgenic plant and/or is an edited plant. In some embodiments, the produced plant is non-transgenic and/or is an edited plant. In some embodiments, the produced plant is transgene free and is an edited plant.

[0151] In some embodiments, a method of the present invention comprises screening a root and/or callus for a polynucleotide introduced by an Agrobacterium rhizogenes strain that is transiently expressed in one or more cell(s) of the root and/or callus. If the screened root and/or callus transiently expresses the polynucleotide, then, in some embodiments, the root and/or callus that transiently expresses the polynucleotide may be selected and a plant may be produced from the root and/or callus. For example, a segment of a root (e.g., a hairy root) may be screened to determine if the polynucleotide is transiently expressed and the remainder of the root may be used to produce a plant (e.g., an edited plant) from the root. In some embodiments, the root and/or callus that transiently expresses the polynucleotide may comprise cells that include a modified nucleic acid, thereby the root and/or may be an edited root and/or an edited callus, respectively. In some embodiments, the plant produced from the root and/or callus that transiently expresses the polynucleotide may comprise cells that include a modified nucleic acid, thereby the plant may be an edited plant that is transgene free. The polynucleotide from the Agrobacterium rhizogenes strain may encode for or comprise all or a portion of an editing system. In some embodiments, all or a portion of an editing system may be introduced separately from the polynucleotide from the Agrobacterium rhizogenes strain. In some embodiments, the plant produced from the root and/or callus that transiently expresses the polynucleotide from the Agrobacterium rhizogenes strain is non-transgenic and/or is an edited plant.

[0152] In some embodiments, a method of the present invention comprises evaluating efficacy (e.g., transformation and/or expression efficiency) of a polynucleotide from an Agrobacterium rhizogenes strain in a cell, plant part, and/or plant. In some embodiments, a method of the present invention comprises evaluating transformation efficiency and/or genome editing efficiency of a polynucleotide from an Agrobacterium rhizogenes strain in a cell, plant part and/or plant. In some embodiments, a method of the present invention comprises evaluating efficacy (e.g., transformation and/or expression efficiency) of an editing system in a cell, plant part and/or plant. In some embodiments, a method of the present invention comprises evaluating transformation efficiency and/or genome editing efficiency of an editing system in a cell, plant part, and/or plant. A method of the present invention may have a transformation efficiency of at least about 1%, 2%, 3%, 4%, 5%, 6%, 7%, 8%, 9%, 10%, or more in a cell, plant part, and/or plant. In some embodiments, a method of the present invention may provide a transformation efficiency (optionally in Rubus (e.g., blackberry) cells/tissue) of at least 4% with a significantly reduced duration in in vitro culture in that the duration for producing the transformed sample (e.g., a plantlet, plant part, etc.) according to a method of the present invention is reduced such as from at least six weeks for conventional methods to about three weeks.

[0153] A method of the present invention may be genotype-independent in that the method may introduce a polynucleotide from an Agrobacterium rhizogenes strain and/or an editing system as described herein into a plant cell regardless of the plant cell's genotype for that plant. In some embodiments, a method of the present invention can introduce a polynucleotide from an Agrobacterium rhizogenes strain and/or an editing system as described herein into a plant cell of every genotype for a particular plant. In some embodiments, a method of the present invention is genotype-independent and/or is less selective on the variety the method works on compared to a method not in accordance with the present invention. In some embodiments, a method of the present invention is genotype-independent and/or is successful with a greater number of varieties than compared to a method not in accordance with the present invention.

[0154] A method of the present invention may comprise producing an edited plant. A method of producing an edited plant may comprise introducing a polynucleotide from an Agrobacterium rhizogenes strain and/or all or a portion of an editing system into a plant cell, optionally into a plant cell of an explant, to provide an edited cell. In some embodiments, an edited root, an edited callus, and/or edited plant is produced from the edited cell. In some embodiments, a method of producing an edited plant comprises introducing a polynucleotide from an Agrobacterium rhizogenes strain into a plant cell of an explant to provide an edited cell, wherein the polynucleotide encodes or comprises at least a portion of an editing system that is capable of modifying a target nucleic acid in the plant cell to provide a modified nucleic acid and thereby the edited cell. A root (e.g., an edited transgenic root or edited non-transgenic root) may be produced from the edited cell and an edited plant may be produced from the root. In some embodiments, the polynucleotide from an Agrobacterium rhizogenes strain encodes or comprises all of an editing system and the editing system may be encoded or comprised in one or more polynucleotide(s). In some embodiments, the plant cell is a cell (e.g., a root-forming competent cell) in an explant such as, but not limited to, a shoot stem nodal explant, shoot tip explant, node explant, shoot node explant, leaf node explant, etc.

[0155] In a method of producing an edited plant, the plant may be a transgenic plant. In some embodiments, the edited plant may be a composite plant, optionally wherein the composite plant comprises a transgenic root and non-transgenic aerial tissue. In some embodiments, the edited plant may be non-transgenic and/or transgene free. In some embodiments, an edited plant may be produced from a transgene free root that comprises cells including a modified nucleic acid. In some embodiments, the edited plant is transgene free.

[0156] In some embodiments, a mature transgenic root may be harvested from an edited plant and/or edited explant and a transgenic plant may be produced from the mature transgenic root. A transgenic plant may comprise transgenic cells and non-transgenic cells, optionally in the same plant part or different plant parts. In some embodiments, a transgenic plant is fully transgenic in that all cells of the plant include an introduced nucleic acid and optionally all cells of the plant may be edited (e.g., comprise a modified nucleic acid). In some embodiments, a transgenic plant is a composite plant in that only a portion of the plant is transgenic (e.g., one or more root(s) of the plant are transgenic). In some embodiments, a transgene free root that comprises cells including a modified nucleic acid is harvested from an edited plant and/or edited explant and a transgene free, edited plant may be produced from the transgene free root. For example, the transgene free root may be harvested from a soil grown edited plant, an edited plant grown in vitro, or an edited explant grown in vitro and the transgene free root may be used to produce a transgene free, edited plant.

[0157] In some embodiments, a method of transforming a plant cell comprises introducing a polynucleotide from a disarmed Agrobacterium rhizogenes strain MSU440 into the plant cell to provide a transformed plant cell, thereby transforming the plant cell. In some embodiments, the transformed plant cell is a transgenic plant cell. A callus and/or root may be formed from the transformed plant cell and may optionally be a transgenic callus and/or root. The transformed plant cell may be stably transformed with the polynucleotide from the disarmed Agrobacterium rhizogenes strain MSU440, thereby providing a transgenic plant cell. In some embodiments, stable expression of the polynucleotide from the disarmed Agrobacterium rhizogenes strain MSU440 allows and/or provides for a target nucleic acid to be modified in the plant cell and thereby provides a modified nucleic acid. In some embodiments, the transformed plant cell may be transiently transformed with the polynucleotide from the disarmed Agrobacterium rhizogenes strain MSU440. In some embodiments, transient expression of the polynucleotide from the disarmed Agrobacterium rhizogenes strain MSU440 allows and/or provides for a target nucleic acid to be modified in the plant cell and thereby provides a modified nucleic acid. A plant (e.g., an edited plant) may be produced from the transformed plant cell, callus, and/or root as described herein.

[0158] According to some embodiments, a method for evaluating transgene function in a plant cell is provided. A method for evaluating transgene function in a plant may comprise introducing a polynucleotide from an Agrobacterium rhizogenes strain into a plant cell to provide a transformed plant cell comprising a transgene; and evaluating the transformed plant cell to determine transgene function. In some embodiments, the polynucleotide encodes or comprises at least a portion of an editing system that is capable of modifying a target nucleic acid in the plant cell to provide a modified nucleic acid. In some embodiments, the evaluating step comprises detecting the presence and/or expression of the polynucleotide from the Agrobacterium rhizogenes strain in the plant cell. In some embodiments, the evaluating step comprises detecting the presence of a hairy root, detecting the expression of a reporter gene, and/or detecting the presence of a transgenic and/or edited callus and/or transgenic and/or edited root. A method for evaluating transgene function in a plant cell may comprise determining whether a target nucleic acid is modified in the transformed plant cell, plant part (e.g., root and/or callus) and/or plant. In some embodiments, a method for evaluating transgene function in a plant cell comprises detecting the presence of a modified nucleic acid in the transformed plant cell, plant part (e.g., root and/or callus) and/or plant. Evaluating the transformed plant cell may be performed at any time after initial contact with an Agrobacterium rhizogenes strain and/or after introduction of a polynucleotide from the Agrobacterium rhizogenes strain into the plant cell. In some embodiments, a transformed plant cell and/or a callus and/or root comprising the transformed plant cell and/or produced from the transformed plant cell is evaluated at about 2 or 3 weeks to about 4, 5, or 6 weeks from the time a plant cell was initially contacted with an Agrobacterium rhizogenes strain and/or from the time a polynucleotide from the Agrobacterium rhizogenes strain was introduced into the plant cell. In some embodiments, a transformed plant cell and/or a callus and/or root comprising the transformed plant cell and/or produced from the transformed plant cell is evaluated at about 2, 3, 4, 5, or 6 weeks from the time a plant cell was initially contacted with an Agrobacterium rhizogenes strain and/or from the time a polynucleotide from the Agrobacterium rhizogenes strain was introduced into the plant cell.

[0159] A method of the present invention may comprise introducing a polynucleotide from an Agrobacterium rhizogenes strain and/or an editing system as described herein into a plant cell such as a dicot plant cell. In some embodiments, the plant cell is a blackberry, raspberry (e.g., red raspberry or black raspberry), artic bramble, or cherry plant cell. In some embodiments, the plant cell is from a plant in the Rubus family. Exemplary plants in the Rubus family include, but are not limited to, Rubus allegheniensis, Rubus occidentalis, Rubus odoratus, and Rubus fruticosus.

[0160] According to embodiments of the present invention, a highly efficient transformation method can be achieved by using an Agrobacterium rhizogenes strain as described herein. In some embodiments, a method of the present invention utilizes an Agrobacterium rhizogenes strain to introduce (e.g., deliver) T-DNA into cells competent to form roots, optionally wherein the cells are cells of an explant, and the method may comprise regenerating a shoot from a transgenic root (e.g., a transgenic root from the explant). In some embodiments, the plant cell is a plant cell in the Rubus genus. A method of the present invention may have a high efficiency and/or may allow for recovery of a transgenic plant and/or a transgene free, edited plant. In some embodiments, a method of the present invention provides an edited plant that is devoid of T-DNA integration from the Agrobacterium rhizogenes strain into the plant's genome. A plant produced according to embodiments of the present invention (e.g., a transgene-free edited plant) may be screened (e.g., molecularly screened) and identified at an early stage, for example, as early as at the stage of root induction after infection with an Agrobacterium rhizogenes strain (e.g., an Agrobacterium rhizogenes strain carrying a binary plasmid). In some embodiments, a method of the present invention uses an Agrobacterium rhizogenes transformation method as a platform for rapidly assessing transgene function, such as genome editing efficiency, optionally in Rubus tissues.

[0161] In some embodiments, a transgene functionality assay method is provided, which may be used to evaluate an editing system and/or genome editing tool. For example, the method may comprise contacting (e.g., infecting) blackberry explants with an Agrobacterium rhizogenes strain (e.g., Agrobacterium rhizogenes strain MSU440) that includes T-DNA encoding or comprising an editing system and producing transgenic calli and/or hairy roots optionally within about 2 weeks to about 4 weeks after contacting the blackberry explants with the Agrobacterium rhizogenes strain. The transgenic calli and/or hairy roots may be used for determining the editing system's efficacy (e.g., the editing system's efficacy in the Rubus plants).

[0162] In some embodiments, a method of providing a disarmed Agrobacterium rhizogenes MSU440 is achieved by taking advantage of the endogenous recA. For example, a knockout cassette (e.g., that contains homology arms flanking an antibiotic resistance cassette for an antibiotic (e.g., tetracycline or gentamicin)) as shown, for example, in FIG. 1, is introduced into the Agrobacterium rhizogenes MSU440 cells by electroporation. Post-transformation, the Agrobacterium rhizogenes MSU440 cells are plated in the presence of the antibiotic (e.g., tetracycline or gentamicin). Surviving cells may be screened by colony PCR and/or Sanger sequencing for replacement of the T-DNA with the antibiotic resistance cassette. The method for providing the disarmed Agrobacterium rhizogenes MSU440 may only require the introduction of the knockout cassette since the endogenous recombination system is responsible for homologous recombination.

[0163] In some embodiments, a method of providing a disarmed Agrobacterium rhizogenes MSU440 is achieved by homologous recombination mediated by X-red proteins Gam, Bet, and Exo. The X-red recombination system has been used previously to modify the genome of Agrobacterium tumefaciens (see Hu, Shengbiao, et al., Applied microbiology and biotechnology 98.5 (2014): 2165-2172). The method may comprise transforming a plasmid containing an expression cassette for Gam, Bet, and Exo into Agrobacterium rhizogenes MSU440 cells. An antibiotic resistance cassette such as described in regard to FIG. 1 may be transformed into Agrobacterium rhizogenes MSU440 expressing the X-red proteins and plated in the presence of the antibiotic (e.g., tetracycline or gentamicin). Surviving cells may then be screened by colony PCR and/or Sanger sequencing for replacement of the T-DNA with the antibiotic resistance cassette.

[0164] In some embodiments, upon verifying T-DNA knockout of an Agrobacterium rhizogenes strain (e.g., Agrobacterium rhizogenes MSU440), the disarmed strain may be used for transformation of a polynucleotide of interest and/or the antibiotic resistance cassette that is in place of the T-DNAs may be removed such as by yeast FLP recombination.

[0165] As described herein, the nucleic acids of the invention and/or expression cassettes and/or vectors comprising the same may be codon optimized for expression in an organism. An organism useful with this invention may be any organism or cell thereof for which nucleic acid modification may be useful. An organism can include, but is not limited to, any animal (e.g., mammal), any plant, any fungus, any archaeon, or any bacterium. In some embodiments, the organism may be a plant or cell thereof.

[0166] A target nucleic acid of any plant or plant part may be modified using the nucleic acid constructs of the invention. Any plant (or groupings of plants, for example, into a genus or higher order classification) may be modified using the nucleic acid constructs of this invention including an angiosperm, a gymnosperm, a monocot, a dicot, a C3, C4, CAM plant, a bryophyte, a fern and/or fern ally, a microalgae, and/or a macroalgae. A plant and/or plant part useful with this invention may be a plant and/or plant part of any plant species/variety/cultivar. The term “plant part,” as used herein, includes but is not limited to, embryos, pollen, ovules, seeds, leaves, stems, shoots, flowers, branches, fruit, kernels, ears, cobs, husks, stalks, roots, root tips, anthers, plant cells including plant cells that are intact in plants and/or parts of plants, plant protoplasts, plant tissues, plant cell tissue cultures, plant calli, plant clumps, and the like. As used herein, “shoot” refers to the above ground parts including the leaves and stems. Further, as used herein, “plant cell” refers to a structural and physiological unit of the plant, which comprises a cell wall and also may refer to a protoplast. A plant cell can be in the form of an isolated single cell or can be a cultured cell or can be a part of a higher-organized unit such as, for example, a plant tissue or a plant organ.

[0167] Non-limiting examples of plants useful with the present invention include turf grasses (e.g., bluegrass, bentgrass, ryegrass, fescue), feather reed grass, tufted hair grass, miscanthus, arundo, switchgrass, vegetable crops, including artichokes, kohlrabi, arugula, leeks, asparagus, lettuce (e.g., head, leaf, romaine), malanga, melons (e.g., muskmelon, watermelon, crenshaw, honeydew, cantaloupe), cole crops (e.g., brussels sprouts, cabbage, cauliflower, broccoli, collards, kale, Chinese cabbage, bok choy), cardoni, carrots, napa, okra, onions, celery, parsley, chick peas, parsnips, chicory, peppers, potatoes, cucurbits (e.g., marrow, cucumber, zucchini, squash, pumpkin, honeydew melon, watermelon, cantaloupe), radishes, dry bulb onions, rutabaga, eggplant, salsify, escarole, shallots, endive, garlic, spinach, green onions, squash, greens, beet (sugar beet and fodder beet), sweet potatoes, chard, horseradish, tomatoes, turnips, and spices; a fruit crop such as apples, apricots, cherries, nectarines, peaches, pears, plums, prunes, cherry, quince, fig, nuts (e.g., chestnuts, pecans, pistachios, hazelnuts, pistachios, peanuts, walnuts, macadamia nuts, almonds, and the like), citrus (e.g., clementine, kumquat, orange, grapefruit, tangerine, mandarin, lemon, lime, and the like), blueberries, black raspberries, boysenberries, cranberries, currants, gooseberries, loganberries, raspberries, strawberries, blackberries, grapes (wine and table), avocados, bananas, kiwi, persimmons, pomegranate, pineapple, tropical fruits, pomes, melon, mango, papaya, and lychee, a field crop plant such as clover, alfalfa, timothy, evening primrose, meadow foam, corn/maize (field, sweet, popcorn), hops, jojoba, buckwheat, safflower, quinoa, wheat, rice, barley, rye, millet, sorghum, oats, triticale, sorghum, tobacco, kapok, a leguminous plant (beans (e.g., green and dried), lentils, peas, soybeans), an oil plant (rape, canola, mustard, poppy, olive, sunflower, coconut, castor oil plant, cocoa bean, groundnut, oil palm), duckweed, Arabidopsis, a fiber plant (cotton, flax, hemp, jute), Cannabis (e.g., Cannabis sativa, Cannabis indica, and Cannabis ruderalis), lauraceae (cinnamon, camphor), or a plant such as coffee, sugar cane, tea, and natural rubber plants; and/or a bedding plant such as a flowering plant, a cactus, a succulent and/or an ornamental plant (e.g., roses, tulips, violets), as well as trees such as forest trees (broad-leaved trees and evergreens, such as conifers; e.g., elm, ash, oak, maple, fir, spruce, cedar, pine, birch, cypress, eucalyptus, willow), as well as shrubs and other nursery stock. In some embodiments, the nucleic acid constructs of the invention and/or expression cassettes and/or vectors encoding the same may be used to modify maize, soybean, wheat, canola, rice, tomato, pepper, sunflower, raspberry, blackberry, black raspberry and/or cherry. In some embodiments, the plant cell is a blackberry, raspberry (e.g., red raspberry), artic bramble, or cherry plant cell. In some embodiments, the plant cell is from a plant in the Rubus family.

[0168] In some embodiments, the invention provides cells (e.g., plant cells, animal cells, bacterial cells, archaeon cells, and the like) comprising one or more polypeptides, polynucleotides, nucleic acid constructs, expression cassettes and/or vectors of the invention.

[0169] The present invention further comprises a kit or kits to carry out the methods of this invention. A kit of this invention can comprise reagents, buffers, and apparatus for mixing, measuring, sorting, labeling, etc, as well as instructions and the like as would be appropriate for modifying a target nucleic acid.

[0170] In some embodiments, the invention provides a kit for comprising an Agrobacterium rhizogenes strain and/or one or more nucleic acid constructs of the invention, and/or expression cassettes and/or vectors and/or cells comprising the same as described herein, with optional instructions for the use thereof. In some embodiments, a kit may further comprise a CRISPR-Cas guide nucleic acid (corresponding to the CRISPR-Cas effector protein encoded by the polynucleotide of the invention) and/or expression cassettes and/or vectors and or cells comprising the same. In some embodiments, a guide nucleic acid may be provided on the same expression cassette and/or vector as one or more nucleic acid constructs of the invention. In some embodiments, the guide nucleic acid may be provided on a separate expression cassette or vector from that comprising the one or more nucleic acid constructs of the invention.

[0171] Accordingly, in some embodiments, kits are provided comprising an Agrobacterium rhizogenes strain and/or a nucleic acid construct comprising (a) a polynucleotide(s) as provided herein and (b) a promoter that drives expression of the polynucleotide(s) of (a). In some embodiments, the kit may further comprise a nucleic acid construct encoding a guide nucleic acid, wherein the construct comprises a cloning site for cloning of a nucleic acid sequence identical or complementary to a target nucleic acid sequence into backbone of the guide nucleic acid.

[0172] In some embodiments, the nucleic acid construct of the invention may be an mRNA that may encode one or more introns within the encoded polynucleotide(s). In some embodiments, the nucleic acid constructs of the invention, and/or an expression cassettes and/or vectors comprising the same, may further encode one or more selectable markers useful for identifying transformants (e.g., a nucleic acid encoding an antibiotic resistance gene, herbicide resistance gene, and the like).

[0173] A polypeptide, polynucleotide, nucleic acid construct, expression cassette, vector, composition, kit, system and/or cell of the present invention may comprise all or a portion of a sequence of one or more of SEQ ID NOs:1-82. In some embodiments, a polypeptide, polynucleotide, nucleic acid construct, expression cassette, vector, composition, kit, system and/or cell of the present invention may comprise at least about 20%, 25%, 30%, 35%, 40%, 45%, 50%, 55%, 60%, 65%, 70%, 75%, 80%, 85%, 90%, 95%, 96%, 97%, 98%, 99%, or more consecutive amino acids of a sequence of one or more of SEQ ID NOs:1-82.

[0174] The invention will now be described with reference to the following examples. It should be appreciated that these examples are not intended to limit the scope of the claims to the invention, but are rather intended to be exemplary of certain embodiments. Any variations in the exemplified methods that occur to the skilled artisan are intended to fall within the scope of the invention.

### EXAMPLES

[0175] Example 1—Comparison of transformation efficiencies in blackberry explants by using Agrobacterium tumefaciens and A. rhizogenes

[0176] Transformation experiments were performed to determine T-DNA delivery and the transformation efficiencies by using Agrobacterium tumefaciens or Agrobacterium rhizogenes in the explants. Number of transgenic calli were scored 3-4 weeks after Agrobacterium infection. An Agrobacterium tumefaciens strain pWise1724-pWise1354-AB62 and an Agrobacterium rhizogenes strain pWise1078-MSU440 are used for this experiment. Table 1 provides data from the experiments. Table 1 provides the data from the experiment using blackberry calli as the starting explants. The Agrobacterium rhizogenes strain showed higher transformation efficiency when calli were used as the explants.

TABLE 1
Transformation comparison between Agrobacterium tumefaciens
and Agrobacterium rhizogenes in blackberry. Blackberry calli
initiated from the leaf culture in vitro were used as the transformation
explants. Transgenic calli were selected on medium containing 100
mg/l spectinomycin. The zsGreen positive calli were scored 50 days
after Agrobacterium infection.

| | | | Number of | Trans- |
|---|---|---|---|---|
| | | Number of | zsGreen- | formation |
| | Agrobacterium | Callus | positive | efficiency |
| Construct | strain | Explants | calli | (%) |
| PWise1724 & | A. Tumefaciens - | 223 | 8 | 3.6 |
| pWise1354 | AB62 | | | |
| pWise1078 | A. Rhizogenes- | 96 | 8 | 8.3 |
| | MSU440 | | | |

[0177] Transformation experiments were performed to determine transformation efficiencies using Agrobacterium tumefaciens or Agrobacterium rhizogenes in red raspberry etiolated seedlings, similarly to what is described above for blackberry. The Agrobacterium strains all contained the same vector, pWISE3804, which contained the reporter gene, zsGreen. The Agrobacterium strains were Agrobacterium tumefaciens Ab62 and the Agrobacterium rhizogenes strains MSU440, Ara4, Qual and 1193. The efficiency of transformation was scored based on presence of zsGreen in explants 3 days after Agrobacterium infection. All of the Agrobacterium strains were able to transform red raspberry etiolated seedlings to some degree, with Agrobacterium rhizogenes strains Ara4 and MSU440 being the most efficient, followed by Agrobacterium tumefaciens strain Ab62 and Agrobacterium rhizogenes strain Qual, and strain 1193 being the least efficient.

### Example 2

[0178] Hairy root induction and generation of a composite plant in blackberry was achieved by transformation using wild-type Agrobacterium rhizogenes strain MSU440 carrying a zsGreen reporter gene from the Ti plasmid. Transformation of blackberry plants was performed essentially as described in Example 4 for the generation of a composite transgenic blackberry plant. The composite transgenic blackberry plant with transgenic roots was evidenced by the expression of the zsGreen fluorescent gene in some of the roots of the composite transgenic blackberry plant and no fluorescence in the aerial part of the plant.

### Example 3

[0179] Agrobacterium rhizogenes-mediated transformation in blackberry was used as a rapid editing tool assay. Transgenic calli were generated from blackberry stem explants after infection with Agrobacterium rhizogenes MSU440 strain carrying zsGreen reporter gene and an editing system in its Ti plasmid. The transgenic calli and hairy roots were routinely produced as evidenced by fluorescence of the zsGreen protein. The transgenic calli and hairy roots were sampled for genome editing analysis. In addition, root samples with no detectable fluorescence signals of zsGreen gene were also analyzed for determining gene editing. Similar editing results were obtained from both zsGreen gene-positive samples and zsGreen gene-negative root samples (Table 2).

TABLE 2
Editing assays in blackberry tissues derived from transformation
experiment using the Agrobacterium rhizogenes MSU440 strain.
The transformation construct used was pWise3803 including a
guide RNA for TFL1 gene and a guide RNA for MIXTA gene each
in blackberry. The genotype of blackberry was BK04.

| | | | | Average Editing |
|---|---|---|---|---|
| Type of Tissue | zsGreen | Number of | | Strength (% |
| Sampled | Detected | samples | locus | indels) |
| Callus | Yes | 20 | bk_tfl1 | 67.85 |
| Hairy Roots | Yes | 16 | bk_tfl1 | 68.71 |
| Roots | No | 6 | bk_tfl1 | 74.92 |
| Callus | Yes | 23 | bk_mixta | 24.06 |
| Hairy Roots | Yes | 20 | bk_mixta | 43.09 |
| Roots | No | 8 | bk_mixta | 58.07 |

### Example 4

[0180] Composite transgenic plants were produced using the following procedures:

[0181] Collected nodal tissue from healthy non-transgenic plants growing in the greenhouse;

[0182] Prepare the nodal explants by cutting the nodes into 2-5 cm segments and performing surface-sterilization with 70% ethanol for 1 min and then 20% bleach for 30 min. Nodal explants were then rinsed with sterilized water;

[0183] An alternative to the nodal explants was to use etiolated shoots generated from the nodal explants by culturing the nodal explants in the dark and collecting etiolated shoots that formed within the following 3 weeks;

[0184] Perform infection of nodal explants or etiolated shoots with an Agrobacterium rhizogenes cell suspension with OD660 readings between 0.5 to 1.0. The strain of A. rhizogenes used includes a T-DNA with at least a marker gene, such as zsGreen, and may also contain a gene(s) of interest.

[0185] Co-cultivate the explants (e.g., nodal explants or etiolated shoots) with A. rhizogenes in a humid environment (e.g., 100% humidity), optionally in a closed environment, for 3-5 days;

[0186] Wash the explants with sterilized water supplemented with antibiotics;

[0187] Transfer and culture the explants on root induction medium without phytohormone for 4-6 weeks during which time new shoots may also start forming;

[0188] Identify the transgenic roots by detecting the reporter gene expression (e.g., expression of zsGreen gene) and culture the composite plantlets in growth media to permit continued composite plant development of both roots and aerial plant parts;

[0189] Select and culture composite plantlets containing transgenic roots and new axillary shoot in a Plantcon; and

[0190] Transplant and grow the composite plantlets in a soil mix by initially planting the composite plantlets in small pots in a growth chamber and then, after further growth, transferring into bigger pots and moving to the greenhouse, thereby providing composite transgenic plants.

### Example 5 Generation of Fully Transgenic Plants from Composite Plants

[0191] Fully transgenic plants were produced from mature transgenic hairy roots selected from composite blackberry plants. The marker for transformation was fluorescence of zsGreen which aided in root selection from the composite plant for production of the fully transgenic plant. The transformation experiments were conducted with the A.r. MSU440 strain in blackberry essentially as described in Example 4 for the development of a composite transgenic blackberry plant. The composite plants were grown in the greenhouse for a minimum of 2 weeks and a maximum of 7 weeks. The composite plant was transferred to cold conditions of 5° C., in the dark, for a range of 1 to 6 weeks to produce root induced plants. The aerial portion of the plant was removed and a root was selected from the root mass. Roots that were showing fluorescence of zsGreen were selected, planted into a soil mix and transferred to the greenhouse to be maintained under 16 hours of light at 28 degrees C. with regular watering. A few shoots began to emerge at the 7 day mark after transfer to the greenhouse and many shoots were observed starting at 3 weeks from the transfer to the greenhouse. Phenotype analysis confirmed that the new shoots that had formed expressed zsGreen indicating that the shoots had emerged from transgenic roots and the aerial and root portions of the plant were both transgenic.

### Example 6 Generation of Non-Transgenic, Edited Plants with MSU440

[0192] Plant transformation is performed essentially as described in Example 4 except that the A. rhizogenes strain MSU440 is engineered to contain CRISPR editing machinery including a spacer sequence which targets a gene of interest in the plant and a binary vector with ZsGreen gene. A large population of composite plants (approx. 1,000) is generated. The total population of roots in any one of the composite plants will be a range of tissues that are edited, transgenic, and/or hairy or any combination of the foregoing.

[0193] The frequency of transgenic but non-hairy roots is determined among the total population of roots generated using wild-type MSU440 containing a binary vector with ZsGreen gene. A molecular assay is used to differentiate hairy roots from non-hairy roots. A molecular assay is also used to determine if the gene of interest is edited by the spacer sequence. Using ZsGreen as a visual marker to distinguish transgenic from non-transgenic roots, combined with the molecular assays, the frequency of transgenic but non-hairy roots among the composite population is determined.

[0194] The frequency of transgenic but non-hairy roots may be increased if the frequency was low from the previous experiments. Transformation parameters such as inoculation and co-culture conditions may be used to improve overall transformation efficiency. Hairy root development may be suppressed but non-hairy root formation near the hairy roots may be promoted.

### Example 7 Origin of Replication in the Ti Plasmid Impacts Transformation Efficiency

[0195] It has been discovered that the type of the origin of replication in the Ti plasmid can impact the transformation efficiency and the ratio between transgenic roots with or without the rol genes. More than two to three-fold transformation efficiency enhancement is produced when a non-Agrobacterium rhizogenes origin of replication was used in the Ti plasmid (Table 3). It is observed that the number of transgenic foci per explant was also enhanced 2.7-fold due to application of the origin of replication from Agrobacterium tumefaciens (Table 3). Transgenic calli/explants were generated essentially as described in Example 4 except the Agrobacterium rhizogenes strain used contained a Ti plasmid which did not have an Agrobacterium rhizogenes origin of replication as further described below.

TABLE 3
Effect of the origin of replication in the Ti plasmid on the
transformation efficiencies in the blackberry. Two types of
explants, namely the leaf node and shoot stem were infected with
an Agrobacterium rhizogenes strain harboring a construct pWise2717
containing an origin of replication from Agrobacterium rhizogenes
or a construct pWise3792 containing an origin of replication derived
from Agrobacterium tumefaciens. Both of these Agrobacterium
strains contained the reporter gene, zsGreen, which was used to
measure transformation efficiency. The reporter gene zsGreen-positive
transgenic foci on the explants were scored 14 days after Agrobacterium
infection. Transformation efficiency is expressed as the percentage
of explants containing positive zsGreen foci.

| | | | | | AVG zsG+ |
|---|---|---|---|---|---|
| | Explant | | #zsG+ | % TE | Foci/ |
| Construct | type | # Explants | Explants | (Putative) | Explant |
| pWise2717- | Nodes | 33 | 9 | 27.3 | 1.36 |
| MSU | Stem | 65 | 21 | 32.3 | |
| pWise3792- | Nodes | 34 | 31 | 91.2 | 3.7 |
| MSU | Stem | 66 | 53 | 80.3 | |

[0196] The effect of the origin replication in the Ti plasmid is further tested with eight constructs, four with the origin of replication from Agrobacterium tumefaciens and another four constructs with the origin of replication from Agrobacterium rhizogenes (Table 4). Significant transformation enhancement was observed by using the origin of replication from Agrobacterium tumefaciens (Table 4).

TABLE 4
Effect of the origin of replication in the Ti plasmid on the transformation
efficiencies in the blackberry. Two types of explants, namely
the leaf node and shoot stem were infected with an
Agrobacterium rhizogenes strain harboring constructs containing an
origin of replication from Agrobacterium rhizogenes or constructs
containing an origin of replication derived from
Agrobacterium tumefaciens. Transformation efficiency is
expressed as the percentage of explants containing positive zsGreen foci.

| | | | | Number of | |
|---|---|---|---|---|---|
| | Source of the | | | zsGreen- | |
| Number of | Origin of | Explant | Number of | positive | |
| Constructs | Replication | type | Explants | Explants | TE (%) |
| 4 | A. tumefaciens | Node | 107 | 78 | 72.9 |
| 4 | A. rhizogenes | Node | 115 | 11 | 9.6 |
| 4 | A. tumefaciens | Stem | 315 | 209 | 66.3 |
| 4 | A. rhizogenes | Stem | 362 | 25 | 6.9 |

[0197] Edited roots, non-transgenic, and non-hairy root and composite plants are generated using wild-type MSU440 containing a binary vector with ZsGreen gene and gene editing tools. A large population of composite plants is generated. A visual marker is used to identify the non-transgenic roots from the composite plants. The non-transgenic roots are screened for selecting target gene editing using part of the roots. The edited composite plants are transferred to soil to allow plant growth in order to obtain mature roots for shoot/plant formation. The plants are grown and gene editing in the plant tissue is verified.

### Example 8 Disarmed A. rhizogenes MSU440 Strain DS101.1

[0198] The development of a disarmed strain of MSU440 relied on a selectable marker (an antibiotic resistance gene or the counter-selectable marker sacB). Antibiotic susceptibility test on MSU440 were formed with the antibiotics outlined in Table 5.

TABLE 5
Data from the antibiotic susceptibility test.

| antibiotic | concentration | | Resistant or susceptible |
|---|---|---|---|
| streptomycin | 50 | ug/mL | resistant |
| spectinomycin | 50 | ug/mL | resistant |
| carbenicillin | 100 | ug/mL | susceptible |
| kanamycin | 50 | ug/mL | susceptible |
| gentamicin | 35 | ug/mL | susceptible |
| tetracycline | 36 | ug/mL | susceptible |
| chloramphenicol | 30 | ug/mL | resistant |

[0199] The sequence of the Ri plasmid in MSU440 was determined and a region of approximately 50 kbp identified for removal from the Ri plasmid to generate the disarmed strain. A homologous recombination knockout cassette was designed as shown in FIG. 1 using gentamicin as the selectable marker. On the inside of the homologous recombination arms, FRT recombination sites (to later remove the antibiotic resistance cassette with FLP recombinase) and a gentamicin resistance cassette (to select for recombinants) were included. The homologous recombination arms were approximately 500-bp directly 5′ and 3′ of the sequence to be knocked out. Disarming MSU440 requires the removal of both T-DNAs and/or the intervening sequence. Once the homologous recombination arms had been identified, the knockout cassette was synthesized and cloned into a binary vector, generating pWISE4108

[0200] We first attempted to disarm Agrobacterium rhizogenes MSU440 by transforming in 1 μg of linear, double-stranded knockout cassette DNA PCR-amplified from pWISE4108 and selecting on LB agar plates with streptomycin 50 μg/mL+gentamicin 50 μg/mL. Our attempts at utilizing the recombination proteins in the host organism to facilitate the homologous recombination between the Ri plasmid and the knockout cassette failed—no colonies were observed on plates with the selectable marker for recombination (gentamicin). The first attempt at disarming MSU440 failed so a second strategy using a suicide vector and SacB counterselection was attempted as has been described in the literature (Aliu et al. 2020, Kazuya et al. 2009). The suicide vector and SacB counter-selection strategy works as described below in FIG. 2.

[0201] We constructed suicide vector pWISE4502 by replacing the Agrobacterium origin of replication in pWISE4108 with the counter-selectable marker sacB. Five 100 μL aliquots of electrocompetent MSU440 were transformed with 2 μg of pWISE4502 (each). Immediately following electroporation, 900 uL of SOC recovery media was added to each transformation and then incubated at 28° C. with shaking at 200 rpm for 3 hours. At the end of the recovery period, each transformation was plated out onto two LB agar+Strep 50 μg/mL+Kan 50 μg/mL plates (total of 10 plates) to select for single crossover events. The plates were inverted and incubated at 28° C. for approximately 72 hours and then checked for the presence of colonies.

[0202] Six colonies were observed on the transformation plates after 72 hours of growth and were named clones DS101.1-DS101.6. Each colony was picked and streaked out to isolation onto LB Agar+Strep 50 μg/mL+Kan 50 μg/mL plates to verify resistance to both streptomycin and kanamycin. Single colonies of each of the six clones were then picked into 4-mL of liquid LB+Strep 50 μg/mL and grown up overnight at 28° C. with 200 rpm shaking. The following day, 100 uL of each overnight culture was plated onto a LB agar+Strep 50 g/mL+5% sucrose plates and incubated at 28° C. for 72 hours to select for the second recombination event to remove sacB.

[0203] After 72 hours of growth, each plate had a lawn (entire surface of the plate) of growth. Colonies were streaked out to isolation on LB Agar+Strep 50 μg/mL+5% sucrose and incubated at 28° C. A single colony from each of the six plates was then streaked onto the LB agar plates shown below in Table 6 to determine if the clone should be sequenced to confirm the removal of the approximately 50 kbp region and replacement with a 2.5 kbp region.

TABLE 6
Antibiotic resistances of potentially disarmed Agrobacterium rhizogenes
MSU440 clones. Four clones were moved on to molecular
characterization by colony PCR.

| | Growth on | Growth on | |
|---|---|---|---|
| Clone | Strep + Gent | Strep + Kan | Conclusion |
| DS101.1 | Yes | No | Move on to colony PCR |
| DS101.2 | Yes | Yes | False positive. Eliminate |
| | | | from further testing |
| DS101.3 | Yes | Yes | False positive. Eliminate |
| | | | from further testing |
| DS101.4 | Yes | No | Move on to colony PCR |
| DS101.5 | Yes | No | Move on to colony PCR |
| DS101.6 | Yes | No | Move on to colony PCR |

FIG. 3 depicts the Ri plasmid of Agrobacterium rhizogenes MSU440, which includes two T-DNAs that are labeled TL-DNA and TR-DNA, and FIG. 4 depicts the Ri plasmid of Agrobacterium rhizogenes strain DS101.1. Alignment of the Ri plasmid sequence from MSU440 with the Ri plasmid sequence from DS101.1 (FIG. 5) clearly shows the replacement of TL-DNA, TR-DNA and then intervening sequence with the gentamicin resistance cassette, exactly as expected. No presence of TL-DNA, TR-DNA, or the intervening sequence was detected in any other contig from the whole genome sequencing of DS101.1. These sequencing results confirm that we successfully disarmed Agrobacterium rhizogenes MSU440 with the Ri plasmid having a sequence of SEQ ID NO:70. The Ri plasmid sequence of the disarmed Agrobacterium rhizogenes strain DS101.1 (SEQ ID NO:70) includes the 2,000 base pairs upstream of the TL-DNA of MSU440 (SEQ ID NO:65) and 2,000 base pairs downstream of the TR-DNA of MSU440 (SEQ ID NO:66). From the region starting at SEQ ID NO:65 and ending at SEQ ID NO:66, SEQ ID NO:64 of DS101.1, has a percent identity of 64% to SEQ ID NO:67 of MSU440. The disarmed Agrobacterium rhizogenes strain DS101.1 is devoid of the sequence of SEQ ID NO:68 of MSU440.

### REFERENCES

[0204] 1. Aliu, Ephraim, et al. “Generation of thymidine auxotrophic Agrobacterium tumefaciens strains for plant transformation.” bioRxiv (2020).
[0205] 2. Kiyokawa, Kazuya, et al. “Construction of disarmed Ti plasmids transferable between Escherichia coli and Agrobacterium species.” Applied and environmental microbiology 75.7 (2009): 1845-1851.

### Example 9—Evaluation of Transformation Efficiencies with an Agrobacterium rhizogenes Strain in Different Cultivars/Genotypes of Blackberry

[0206] Transformation experiments in several blackberry genotypes were performed to demonstrate Agrobacterium rhizogenes strain MSU440 transformation of multiple blackberry cultivars. Transformation was performed essentially as described in Example 4 using Agrobacterium rhizogenes strain MSU440 modified to contain a fluorescent gene marker, zsGreen. The results indicate the effectiveness of A. rhizogenes MSU440 strain in T-DNA delivery in different genotypes of Rubus (blackberry) plants (Table 7).

TABLE 7
Transformation tests with Agrobacterium rhizogenes MSU440
strain in three blackberry cultivars. The construct used
in this study was pWise3803. The zsGreen positive transgenic
calli and hairy roots were determined by screening the
cultured explants with a fluorescence scope.

| | | | % Explants |
|---|---|---|---|
| | Number | % Explants with | with zsGreen |
| | of | zsGreen Positive | positive |
| Cultivar | explants | Calli/Hairy Roots | Hairy Roots |
| BK01 | 165 | 69.09 | 1.82 |
| BK04 | 178 | 89.33 | 45.51 |
| BK13 | 202 | 72.77 | 4.95 |

### Example 10—Blackberry Transformation with Disarmed Agrobacterium rhizogenes MSU440 Strain DS101.1

[0207] Transformation experiments were conducted to test the disarmed A.r. MSU440 strain, DS101.1 in blackberry. Transformation efficiencies between 62% to 79% were obtained when the wild-type A.r. MSU440 strain harboring construct pWise3880 was used in the transformation method substantially as described in Example 4 except that the root induction media was supplemented with 2,4-D and chlorosulfuron. The rol genes from the A.r. MSU440 strain were removed in the process of developing the DS101.1 strain. The DS101.1 strain maintains its ability to transform plant cells; however, the transgenic plant cells do not display the rol gene's functionality of inducing transgenic calli and hairy roots. This lack of phenotype results in significant reduction in apparent transformation efficiency with absence of auxin and selection agent (Table 8). In the presence of auxin (2,4-D) and chlorosulfuron, the transgenic cells derived from using the disarmed A.r. MSU440 strain DS101.1 also harbored a chlorosulfuron resistant gene developed to visible transgenic calli (Treatment T-9 and T-12, Table 8).

TABLE 8
Transformation evaluation with disarmed
A.r. MSU440 strain DS101.1 in blackberry.

| | | | | % |
|---|---|---|---|---|
| | | | | Explants |
| | | | | with |
| | | | | zsGreen |
| | | Callus Induction | Number of | positive |
| Treatment | p Wise | Media | Explants | Calli |
| T-1 | pWise3880- | ICM | 24 | 79.2 |
| | MSU440 | | | |
| T-2 | pWise3880- | ICM + 1 mg/l 2,4-D + | 24 | 70.8 |
| | MSU440 | 0.2 mg/l BAP | | |
| T-3 | pWise3880- | ICM + 1 mg/l 2,4-D + | 16 | 62.5 |
| | MSU440 | 0.2 mg/l BAP + 0.2 | | |
| | | uM Chloro | | |
| T-4 | pWise3804- | ICM | 12 | 0.0 |
| | DS101.1-1 | | | |
| T-5 | pWise3804- | ICM + 1 mg/l 2,4-D + | 10 | 0.0 |
| | DS101.1-1 | 0.2 mg/l BAP | | |
| T-6 | pWise3804- | ICM + 1 mg/l 2,4-D + | 11 | 0.0 |
| | DS101.1-1 | 0.2 mg/l BAP + 0.2 | | |
| | | uM Chloro | | |
| T-7 | pWise3880- | ICM | 29 | 3.4 |
| | DS101.1-1 | | | |
| T-8 | pWise3880- | ICM + 1 mg/l 2,4-D + | 34 | 5.9 |
| | DS101.1-1 | 0.2 mg/l BAP | | |
| T-9 | pWise3880- | ICM + 1 mg/l 2,4-D + | 12 | 25.0 |
| | DS101.1-1 | 0.2 mg/l BAP + 0.2 | | |
| | | uM Chloro | | |
| T-10 | pWise3880- | ICM | 23 | 0.0 |
| | DS101.1-2 | | | |
| T-11 | pWise3880- | ICM + 1 mg/l 2,4-D + | 48 | 4.2 |
| | DS101.1-2 | 0.2 mg/l BAP | | |
| T-12 | pWise3880- | ICM + 1 mg/l 2,4-D + | 45 | 20.0 |
| | DS101.1-2 | 0.2 mg/l BAP + 0.2 | | |
| | | uM Chloro | | |

(ICM: hairy root induction medium without phytohormone and selection agent; chloro: chlorosulfuron; DS101.1-1 and DS101.1-2: two disarmed MSU440 strains carrying different transformation plasmids; pWise3880: transformation construct containing a chlorosulfuron resistant gene and zsGreen visual marker in its T-DNA; pWise3804: a transformation construct containing zsGreen visual marker gene in its T-DNA)

### Example 11—Generation of Edited Plants with and without T-DNA Integration in Blackberry

[0208] Experiments are conducted to test the processes of recovering gene edited Rubus plants which contain and do not contain T-DNA in their genome.

[0209] In one experiment, transformation experiments are performed by using wild-type A. rhizogenes strain with Ri and Ti T-DNAs concurrently which are modified to contain the marker gene, zsGreen, as well as genes necessary for editing a target of interest. Composite plants are generated substantially as described in Example 4 and regenerated roots of zsGreen-positive and zsGreen-negative phenotypes after A. rhizogenes infection are collected and screened for detecting gene editing activities, as well as the presence and absence of rol genes and T-DNA of Ti plasmid. Transgenic edited roots show the presence of Ti TDNA (+/−Ri T-DNA) and the editing activities on the target gene. Non-transgenic edited roots show absence of Ri and Ti T-DNA, but the presence of editing activity on the gene target. The selected roots are cultured for recovering the edited plants substantially as described in Example 5.

[0210] In another experiment, transformation experiments are performed by using a disarmed A. rhizogenes strain with Ti T-DNA only which is modified to contain a marker gene, zsGreen, as well as genes necessary for editing a target gene. Composite plants are generated substantially as described in Example 4, and regenerated roots of zsGreen-positive and zsGreen-negative phenotypes after A. rhizogenes infection are collected and screened for detecting gene editing activities, and the presence or absence of T-DNA of Ti plasmid. Transgenic edited roots show the presence of Ti TDNA and the editing activities on the target gene. Non-transgenic edited roots show the absence of Ti T-DNA, but the presence of editing activity on the gene target. The selected roots are cultured for recovering the edited plants from the roots substantially as described in Example 5.

[0211] In a third experiment, transformation experiments are carried out by using a disarmed A. rhizogenes strain harboring Ti T-DNA which contains two gRNAs targeting to the gene of interest and a herbicide resistance gene such as a modified acetolactate synthase (ALS). Composite plants are generated essentially as described in Example 4 except that after Agrobacterium infection, the explants are subjected to herbicide selection for recovering roots which are tolerant to the corresponding herbicide. A presence or absence molecular assay for the Ti T-DNA in the roots is performed to determine if the roots are transgenic (with the T-DNA) or non-transgenic (without T-DNA). Next generation sequencing analysis is performed to identify editing activities on the target gene (the gene of interest). The selected roots are cultured for recovering the edited plants from the roots substantially as described in Example 5.

### Example 12—Agrobacterium rhizogenes-Mediated Transformation—Strain Evaluation in Black Raspberry and Blackberry

[0212] Black raspberry leaf node and stem explants were harvested from the greenhouse, and surface-sterilized with 70% ethanol for 1 min; 20% bleach solution for 30 min; and then rinsed with sterile water 4-5 times. The explants were cultured on MS agar medium for 6-14 days at 25C light. The explants were then cut into 1 to 2 cm segments and contacted with an Agrobacterium cell suspension (OD660=0.6). The explants were incubated in the Agrobacterium cell suspension (e.g., by submerging the explants in the suspension) for about 15 to 30 min. The co-cultivation step was done by transferring the explants to the co-cultivation agar medium with one layer of sterile filter paper and incubating at 23C for 3 days. After the co-cultivation step, explants were washed with sterile water supplemented with antibiotics (250 mg/l Carbenicillin and 200 mg/l Timentin). Explants were then transferred to and cultured on MS medium containing antibiotics (250 mg/l Carbenicillin and 200 mg/l Timentin) under light, at 25C for up to 6 weeks. Evaluation of transformation efficiencies was performed by scoring zsGreen calli or hairy roots with a fluorescence dissection scope.

[0213] High transformation efficiencies in the black raspberry were observed by using either Agrobacterium rhizogenes strains A.r.A4 or MSU440 (Table 9). In comparing these two strains, A.r. strain MSU440 not only provides high transformation efficiency, but also promotes rapid growth of the zsGreen-positive transgenic calli and/or hairy roots (Table 9). In contrast, the A.r. strain K599 does not yield transgenic calli in this experiment.

TABLE 9
Transformation evaluation by comparing three different Agrobacterium rhizogenes
strains in black raspberry (Cultivar BR-11). Agrobacterium rhizogenes
strains harboring zsGreen gene in their Ti plasmids (pWise3804) were
compared in the transformation experiment.

| | | | Number | | |
|---|---|---|---|---|---|
| | | | of | % | Size of |
| | | | zsGreen- | zsGreen- | zsGreen- |
| Agrobacterium | | Number of | positive | positive | positive |
| Strain | Construct | Explants | Explants | Explants | Calli |
| A.r. A4 | pWise3804 | 138 | 114 | 82.6 | Small |
| A.r. K599 | pWise3804 | 127 | 0 | 0.0 | N/A |
| A.r. MSU440 | pWise3804 | 128 | 122 | 95.3 | Medium to |
| | | | | | Large |

[0214] A similar experiment was also conducted in blackberry. The leaf node and stem explants were harvested from the greenhouse, and surface-sterilized with 70% ethanol for 1 min; 20% bleach solution for 30 min; and then rinsed with sterile water 4-5 times. The explants were cultured on MS agar medium for 8 days at 25C light. Agrobacterium infection was performed by cutting the above prepared explants into 1 to 2 cm segments in the Agrobacterium cell suspension (OD660=0.8-1.0). The explants submerged in the Agrobacterium cell suspension were then sonicated for 2 min, and then incubated for about 15 to 30 min. The co-cultivation step was done by transferring the explants to the co-cultivation agar medium with one layer of sterile filter paper and incubating at 23C for 5 days. After the co-cultivation step, explants were washed with sterile water supplemented with antibiotics (250 mg/l Carbenicillin and 200 mg/l Timentin). Explants were then transferred to and cultured on MS medium containing antibiotics (250 mg/l Carbenicillin and 200 mg/l Timentin) under light, at 25C for up to 6 weeks. Evaluation of transformation efficiencies was performed by scoring zsGreen calli or hairy roots with a fluorescence dissection scope.

[0215] High transformation efficiencies in the blackberry were observed by using either Agrobacterium rhizogenes strains A.r.A4 or MSU440 (Table 10). Similarly, A.r. strain MSU440 provides high transformation efficiency and promotes rapid growth of the zsGreen-positive transgenic calli and/or hairy roots (Table 10).

[0216] Table 10: Transformation evaluation by comparing two different Agrobacterium rhizogenes strains in blackberry (Cultivar BK-13). Agrobacterium rhizogenes strains harboring zsGreen gene in their Ti plasmids (pWise3804) were used in the transformation experiment.

TABLE 10
Transformation evaluation by comparing two different
Agrobacterium rhizogenes strains in blackberry (Cultivar BK-13).
Agrobacterium rhizogenes strains harboring zsGreen gene in their Ti
plasmids (pWise3804) were used in the transformation experiment.

| | | | Number | |
|---|---|---|---|---|
| | | | of | |
| | | | zsGreen- | % zsGreen- |
| Agrobacterium | | Number of | positive | positive |
| Strains | Construct | Explants | Explants | Explants |
| A.r. A4 | pWise3804 | 31 | 18 | 58.1 |
| A.r. MSU440 | pWise3804 | 15 | 13 | 86.7 |

### Example 13—Black Raspberry and Blackberry Transformation with Agrobacterium rhizogenes Strain MSU440: Transformation Responses by Using Different Types of Explants

[0217] Black raspberry leaf node and stem explants were harvested from the greenhouse, and surface-sterilized with 70% ethanol for 1 min; 20% bleach solution for 30 min; and then rinsed with sterile water 4-5 times. The explants were cultured on MS agar medium for 6-14 days at 25C light. After culturing the explants on the MS medium, axillary shoots started to develop from the leaf nodal meristem. The explants were then cut into 1 to 2 cm segments and the newly developed axillary shoots were cut off. The cut explant material and the cut off axillary shoots were contacted with an Agrobacterium cell suspension (OD660=0.6). The explants were incubated in the Agrobacterium cell suspension (e.g., by submerging the explants in the suspension) for about 15 to 30 min. The co-cultivation step was done by transferring the explants to the co-cultivation agar medium with one layer of sterile filter paper and incubating at 23C for 3 days. After the co-cultivation step, explants were washed with sterile water supplemented with antibiotics (250 mg/l Carbenicillin and 200 mg/l Timentin). Explants were then transferred to and cultured on MS medium containing antibiotics (250 mg/l Carbenicillin and 200 mg/l Timentin) under light, at 25C for up to 6 weeks. Evaluation of transformation efficiencies was performed by scoring zsGreen calli or hairy roots with a fluorescence dissection scope.

[0218] When transformation explants derived from the greenhouse grown plants were cultured for 6 to 14 days prior to transformation, the newly developed axillary shoots and the nodes/stem segments are both highly transformable with A.r. strain MSU440 in the black raspberry (Table 11) and blackberry (Table 12). Surprisingly, the axillary shoots that had developed in vitro prior to contact with the Agrobacterium cell suspension, were able to form hairy roots easily following contact with the Agrobacterium cell suspension, hence providing composite plants.

TABLE 11
Transformation with node/stem and axillary shoot as the
target explants in Black raspberry. Agrobacterium rhizogenes
strain MSU440 harboring a Ti plasmid with kanamycin resistant
marker NPT-II gene (pWise3737) and the Black raspberry
cultivar BR-11 was used in this experiment

| | | | Number | % |
|---|---|---|---|---|
| | | | of | zsGree |
| | | | zsGreen- | n- |
| Type of | | Number of | positive | positive |
| Explants | Selection | Explants | Explants | Explants |
| Node/Stem | 150 mg/l Kan | 120 | 120 | 100 |
| Axillary Shoot | 150 mg/l Kan | 60 | 60 | 100 |

TABLE 12
Transformation with node/stem and axillary shoot as the target explants
in blackberry (Cultivar BK-13). Transformation data were obtained
by pooling transformation efficiency data from using three transformation
constructs (pWise4847, pWise4961, pWise5043) in
Agrobacterium rhizogenes strain MSU440 in this experiment.

| | | Number of | |
|---|---|---|---|
| | Number | zsGreen- | % zsGreen- |
| Type of | of | positive | positive |
| Explants | Explants | Explants | Explants |
| Node/Stem | 59 | 34 | 57.6 |
| Axillary Shoot | 35 | 29 | 82.9 |

[0219] The foregoing is illustrative of the present invention and is not to be construed as limiting thereof. The invention is defined by the following claims, with equivalents of the claims to be included therein.

That which is claimed is:

1. A method of transforming a plant cell, the method comprising:
introducing a polynucleotide from an Agrobacterium rhizogenes strain into the plant cell to provide a transformed plant cell, thereby transforming the plant cell.

2. The method of claim 1, wherein the polynucleotide encodes or comprises at least a portion of an editing system that is capable of modifying a target nucleic acid in the plant cell to provide a modified nucleic acid, optionally wherein the polynucleotide encodes or forms a ribonucleoprotein.

3. The method of claim 1 or 2, wherein the plant cell is a root-forming competent cell.

4. The method of any one of the preceding claims, wherein the introducing step comprises contacting the Agrobacterium rhizogenes strain and an explant (e.g., a shoot stem nodal explant, shoot tip explant, node explant, etc.) comprising the plant cell, optionally wherein the plant cell is present in a callus of the explant and the Agrobacterium rhizogenes strain is contacted to the callus to provide a transformed callus.

5. The method of any one of the preceding claims, wherein introducing the polynucleotide from the Agrobacterium rhizogenes strain into the plant cell comprises concurrently introducing transfer DNA (T-DNA) from a tumor-inducing (Ti) plasmid and hairy root-inducing (Ri) plasmid of the Agrobacterium rhizogenes strain, optionally wherein the T-DNA from the Ti plasmid (e.g., a Ti plasmid comprising a non-Agrobacterium rhizogenes origin of replication) and the T-DNA from the Ri plasmid are concurrently integrated into the genome of the plant cell to provide a transgenic plant cell.

6. The method of any one of the preceding claims, further comprising forming a callus (e.g., a transgenic callus) from the transformed plant cell or culturing the transformed callus.

7. The method of any one of the preceding claims, wherein the plant cell is stably transformed with the polynucleotide.

8. The method of any one of the preceding claims, wherein the polynucleotide is stably expressed in the transformed plant cell and wherein the method further comprises modifying a target nucleic acid in the transformed plant cell to provide a modified nucleic acid.

9. The method of any one of claims 1-6, wherein the plant cell is transiently transformed with the polynucleotide.

10. The method of any one of claims 1-6 or 9, wherein the polynucleotide is transiently expressed in the transformed plant cell and wherein the method further comprises modifying a target nucleic acid in the transformed plant cell to provide a modified nucleic acid.

11. The method of any one of the preceding claims, further comprising producing a root (e.g., a hairy root) from the transformed plant cell or edited plant cell, optionally wherein the root comprises cells including a modified nucleic acid.

12. The method of claim 11, wherein producing the root from the transformed plant cell or edited plant cell comprises inducing root formation in the absence of an exogenous plant growth substance (e.g., plant growth regulators and/or hormones).

13. The method of claim 11 or 12, wherein the root is produced de novo from the explant.

14. The method of claim 11 or 12, wherein the root is derived from a shoot tip of the explant, optionally wherein a shoot meristem explant is converted into a composite plant.

15. The method of any one of the preceding claims, further comprising producing a transgenic root from the transformed plant cell, optionally wherein the transgenic root is a transgenic hairy root.

16. The method of claim 15, wherein the transgenic root comprises the polynucleotide, optionally wherein the polynucleotide comprises transfer DNA (T-DNA) from a plasmid in the Agrobacterium rhizogenes strain (e.g., from a Ti plasmid optionally comprising a non-Agrobacterium rhizogenes origin of replication), optionally wherein the polynucleotide is an engineered recombinant polynucleotide.

17. The method of any one of the preceding claims, further comprising evaluating the efficacy of the polynucleotide, optionally wherein evaluating the efficacy of the polynucleotide comprises evaluating the transformation efficiency and/or genome editing efficiency of the polynucleotide.

18. The method of any one of claims 11-17, further comprising generating a shoot from the root (e.g., a transgenic root), optionally wherein the shoot is transgenic and/or the shoot comprises cells including the modified nucleic acid.

19. The method of claim 18, wherein the shoot is transgene-free and comprises cells including the modified nucleic acid.

20. The method of any one of claims 11-19, further comprising producing a plant from the root and/or shoot, optionally wherein the plant is transgenic and/or the plant comprises cells including the modified nucleic acid.

21. The method of claim 20, wherein the plant is a transgenic plant, optionally wherein the transgenic plant is produced from a mature transgenic root.

22. The method of claim 20, wherein the plant is a transgene-free plant that comprises cells including the modified nucleic acid, optionally wherein the transgene-free plant is produced from a root comprising cells including the modified nucleic acid.

23. The method of claim 20, wherein the plant is a transgenic composite plant, optionally wherein the transgenic composite plant is produced from a node explant upon infection by Agrobacterium rhizogenes strain.

24. The method of claim 23, wherein the transgenic composite plant comprises transgenic roots and optionally non-transgenic aerial tissue and/or non-transgenic roots.

25. The method of any one of the preceding claims, wherein the Agrobacterium rhizogenes strain is a wild-type Agrobacterium rhizogenes strain.

26. The method of any one of claims 1-24, wherein the Agrobacterium rhizogenes strain is a disarmed Agrobacterium rhizogenes strain (i.e., the disarmed Agrobacterium rhizogenes strain is devoid of T-DNA in its hairy root-inducing (Ri) plasmid and the Ri plasmid comprises trans factors (e.g., vir genes).

27. The method of claim 26, wherein the disarmed Agrobacterium rhizogenes strain is a disarmed Agrobacterium rhizogenes strain 1193, a disarmed Agrobacterium rhizogenes strain A4, a disarmed Agrobacterium rhizogenes strain Qual, a disarmed Agrobacterium rhizogenes strain K599 and/or a disarmed Agrobacterium rhizogenes strain MSU440 (e.g., Agrobacterium rhizogenes strain DS101.1 and/or Agrobacterium rhizogenes strain comprising a sequence of SEQ ID NO:70).

28. The method of any one of the preceding claims, wherein the Agrobacterium rhizogenes strain is selected from the group consisting of Agrobacterium rhizogenes strain 1193, Agrobacterium rhizogenes strain A4; Agrobacterium rhizogenes strain Qual, Agrobacterium rhizogenes strain K599 and Agrobacterium rhizogenes strain MSU440.

29. The method of any one of the preceding claims, further comprising screening for the polynucleotide, a modified nucleic acid, or a given phenotype, optionally wherein the screening comprises screening the callus and/or root for the polynucleotide, the modified nucleic acid, or the given phenotype.

30. The method of claim 29, wherein the screening comprises screening the root for the polynucleotide that is transiently expressed in cells of the root and, responsive to the screening, selecting the root that transiently expresses the polynucleotide, and producing a plant from the root that transiently expresses the polynucleotide, wherein the plant comprises cells including the modified nucleic acid.

31. The method of claim 29, wherein the screening comprises screening the root for cells comprising the modified nucleic acid and, responsive to the screening, selecting the root comprising cells including the modified nucleic acid, and producing a plant from the root comprising cells including the modified nucleic acid, wherein the plant comprises cells including the modified nucleic acid.

32. The method of any one of the preceding claims, further comprising performing molecular screening for the polynucleotide, a modified nucleic acid, or a given phenotype, optionally wherein performing molecular screening comprises performing molecular screening on the root for the polynucleotide, the modified nucleic acid, or the given phenotype.

33. The method of any one of the preceding claims, wherein the plant cell is a dicot plant cell, optionally wherein the plant cell is a blackberry, raspberry (e.g., red raspberry), artic bramble, or cherry plant cell.

34. The method of any one of the preceding claims, wherein the plant cell is from a plant in the Rubus family, optionally wherein the plant is Rubus allegheniensis, Rubus occidentalis, Rubus odoratus, or Rubus fruticosus.

35. The method of any one of the preceding claims, wherein the method is genotype-independent.

36. The method of any one of the preceding claims, wherein the method has a transformation efficiency of at least about 4%.

37. A method of producing an edited plant, the method comprising:
introducing a polynucleotide from an Agrobacterium rhizogenes strain into a plant cell of an explant to provide an edited cell, wherein the polynucleotide encodes or comprises at least a portion of an editing system that is capable of modifying a target nucleic acid in the plant cell to provide a modified nucleic acid and thereby an edited cell;
producing a root from the edited cell; and
producing an edited plant from the root.

38. The method of 37, wherein the explant is a shoot node explant (e.g., a shoot stem nodal explant).

39. The method of 37 or 38, wherein the root is a transgenic root and the edited plant is produced from the transgenic root.

40. The method of any one of claims 37-39, wherein the edited plant is a composite plant comprising the transgenic root.

41. The method of 37 or 38, wherein the root is transgene free and comprises cells including the modified nucleic acid, and wherein the edited plant is transgene free and comprises cells including the modified nucleic acid.

42. The method of any one of claims 37-40, further comprising harvesting a mature transgenic root from the edited plant and producing a transgenic plant from the mature transgenic root.

43. The method of any one of claims 37-40, further comprising harvesting a transgene free root that comprises cells including the modified nucleic acid from the edited plant and producing a transgene free edited plant from the transgene free root.

44. A method of transforming a plant cell, the method comprising:
introducing a polynucleotide from a disarmed Agrobacterium rhizogenes strain MSU440 (e.g., Agrobacterium rhizogenes strain DS101.1 and/or Agrobacterium rhizogenes strain comprising a sequence of SEQ ID NO:70) into the plant cell to provide a transformed plant cell, thereby transforming the plant cell.

45. The method of claim 44, further comprising forming a callus (e.g., a transgenic callus) from the transformed plant cell or wherein the plant cell is present in a callus.

46. The method of 44 or 45, wherein the polynucleotide encodes or comprises at least a portion of an editing system that is capable of modifying a target nucleic acid in the plant cell to provide a modified nucleic acid, optionally wherein the polynucleotide encodes or forms a ribonucleoprotein.

47. The method of any one of claims 44-46, wherein the plant cell is a root-forming competent cell.

48. The method of any one of claims 44-47, wherein the plant cell is stably transformed with the polynucleotide.

49. The method of any one of claims 44-48, wherein the polynucleotide is stably expressed in the transformed plant cell and wherein the method further comprises modifying a target nucleic acid in the transformed plant cell to provide an edited, transgenic plant cell including a modified nucleic acid.

50. The method of any one of claims 44-47, wherein the plant cell is transiently transformed with the polynucleotide.

51. The method of any one of claims 44-47 or 50, wherein the polynucleotide is transiently expressed in the transformed plant cell and wherein the method further comprises modifying a target nucleic acid in the transformed plant cell to provide an edited plant cell including a modified nucleic acid.

52. The method of any one of claims 44-51, further comprising producing a root (e.g., a hairy root) from the transformed plant cell and/or callus, optionally wherein the root comprises cells including the modified nucleic acid.

53. The method of claim 52, wherein producing the root from the transformed plant cell and/or callus comprises inducing root formation in the absence of an exogenous plant substance (e.g., plant growth regulators and/or hormones).

54. The method of any one of claims 44-53, further comprising producing a transgenic root from the transformed plant cell, optionally wherein the transgenic root is a transgenic hairy root.

55. The method of claim 54, wherein the transgenic root comprises the polynucleotide, optionally wherein the polynucleotide is transfer DNA (T-DNA) from a plasmid of the disarmed Agrobacterium rhizogenes strain MSU440 (e.g., a tumor-inducing (Ti) plasmid optionally comprising a non-Agrobacterium rhizogenes origin of replication).

56. The method of any one of claims 44-55, further comprising evaluating the efficacy of the polynucleotide, optionally wherein evaluating the efficacy of the polynucleotide comprises evaluating the transformation efficiency and/or genome editing efficiency of the polynucleotide.

57. The method of any one of claims 44-56, wherein the callus (e.g., transgenic callus) and/or root (e.g., transgenic root) are present about 2 weeks to about 4 or 6 weeks after the step of introducing the polynucleotide from the disarmed Agrobacterium rhizogenes strain MSU440.

58. A method for evaluating transgene function in a plant cell, the method comprising:
introducing a polynucleotide from an Agrobacterium rhizogenes strain into the plant cell to provide a transformed plant cell comprising the transgene, optionally wherein the polynucleotide encodes or comprises at least a portion of an editing system that is capable of modifying the target nucleic acid in the plant cell to provide a modified nucleic acid; and
evaluating the transformed plant cell to determine transgene function.

59. The method of claim 58, wherein the evaluating step comprises detecting the presence of hairy roots, detecting the expression of a reporter gene, and/or detecting the presence of a transgenic callus and/or transgenic root.

60. The method of claim 58 or 59, further comprising determining whether the target nucleic acid is modified in the transformed plant cell and/or detecting the presence of the modified nucleic acid in the transformed plant cell.

61. The method of any one of claims 58-60, wherein the evaluating and/or determining step(s) are carried out at about 2 weeks to about 4 or 6 weeks after the step of introducing the polynucleotide from the Agrobacterium rhizogenes strain.

62. A disarmed Agrobacterium rhizogenes strain comprising a deletion in the Ri plasmid, wherein the deletion is in a region of the MSU440 Ri plasmid from base pair 70,000 to base pair 130,000, wherein the base pair number is from the start of the origin of replication of the MSU440 Ri plasmid, or an optimally aligned region thereto for a different Ri plasmid.

63. The disarmed Agrobacterium rhizogenes strain of claim 62, wherein the deletion in the region of the MSU440 Ri plasmid or optimally aligned region thereto is a deletion of about 40,000 base pairs to about 60,000 base pairs, optionally wherein the deletion in the region of the MSU440 Ri plasmid or optimally aligned region thereto is a deletion of about 50,000 base pairs.

64. The disarmed Agrobacterium rhizogenes strain of claim 62 or 63, wherein the deletion in the region of the MSU440 Ri plasmid or optimally aligned region thereto is in a region having a sequence identity of about 70%, 75%, 80%, 85%, 90%, 95%, 96%, 97%, 98%, 99%, or more to SEQ ID NO:67, optionally wherein the region has a sequence of SEQ ID NO:67.

65. The disarmed Agrobacterium rhizogenes strain of any one of claims 62-64, wherein the deletion in the region of the MSU440 Ri plasmid or optimally aligned region thereto has a sequence identity of about 70%, 75%, 80%, 85%, 90%, 95%, 96%, 97%, 98%, 99%, or more to SEQ ID NO:68 (i.e., the Ri plasmid of the disarmed Agrobacterium rhizogenes strain is devoid of a sequence having a sequence identity of about 70%, 75%, 80%, 85%, 90%, 95%, 96%, 97%, 98%, 99%, or more to SEQ ID NO:68), optionally wherein the Ri plasmid of the disarmed Agrobacterium rhizogenes strain is devoid of a sequence of SEQ ID NO:68.

66. The disarmed Agrobacterium rhizogenes strain of any one of claims 62-65, wherein the deletion is in the T-DNA of the Ri plasmid that comprises the rol gene for the MSU440 Ri plasmid or the different Ri plasmid.

67. A disarmed Agrobacterium rhizogenes strain prepared from Agrobacterium rhizogenes strain MSU440 by deleting about 70%, 75%, 80%, 85%, 90%, 95%, 96%, 97%, 98%, 99%, or 100% of SEQ ID NO:67 in the Ri plasmid of the Agrobacterium rhizogenes strain MSU440, wherein the Ri plasmid of the Agrobacterium rhizogenes strain MSU440 has a sequence of SEQ ID NO:69.

68. The disarmed Agrobacterium rhizogenes strain of claim 67, wherein the disarmed Agrobacterium rhizogenes strain is prepared from Agrobacterium rhizogenes strain MSU440 by deleting about 70%, 75%, 80%, 85%, 90%, 95%, 96%, 97%, 98%, 99%, or 100% of SEQ ID NO:68 in the Ri plasmid of the Agrobacterium rhizogenes strain MSU440, optionally wherein the disarmed Agrobacterium rhizogenes strain is prepared from Agrobacterium rhizogenes strain MSU440 by deleting a sequence of SEQ ID NO:68.

69. The disarmed Agrobacterium rhizogenes strain of any one of claims 62-68, wherein the Ri plasmid of the disarmed Agrobacterium rhizogenes strain is devoid of a functional rol gene.

70. The disarmed Agrobacterium rhizogenes strain of any one of claims 62-69, wherein the Ri plasmid of the disarmed Agrobacterium rhizogenes strain is devoid of about 70%, 75%, 80%, 85%, 90%, 95%, 96%, 97%, 98%, 99%, or 100% of one or more of SEQ ID NOs:73-77 and/or devoid of about 70%, 75%, 80%, 85%, 90%, 95%, 96%, 97%, 98%, 99%, or 100% of a sequence encoding one or more of SEQ ID NO:78-82, optionally wherein the Ri plasmid of the disarmed Agrobacterium rhizogenes strain is devoid of a rol gene.

71. The disarmed Agrobacterium rhizogenes strain of any one of claims 62-70, wherein the Ri plasmid of the disarmed Agrobacterium rhizogenes strain is devoid of the T-DNA that contains the rol gene.

72. The disarmed Agrobacterium rhizogenes strain of any one of claims 62-71, wherein the Ri plasmid of the disarmed Agrobacterium rhizogenes strain is devoid of about 70%, 75%, 80%, 85%, 90%, 95%, 96%, 97%, 98%, 99%, or 100% of SEQ ID NO:71 and/or SEQ ID NO:72, optionally wherein the Ri plasmid of the disarmed Agrobacterium rhizogenes strain is devoid of T-DNA.

73. The disarmed Agrobacterium rhizogenes strain of any one of claims 62-72, wherein the Ri plasmid of the disarmed Agrobacterium rhizogenes strain comprises the trans factors of the Ri plasmid of the MSU440 Ri plasmid or the different Ri plasmid, optionally wherein the Ri plasmid of the disarmed Agrobacterium rhizogenes strain comprises the vir genes the MSU440 Ri plasmid or the different Ri plasmid.

74. The disarmed Agrobacterium rhizogenes strain of any one of claims 62-73, wherein the Ri plasmid of the disarmed Agrobacterium rhizogenes strain comprises an additional sequence compared to the MSU440 Ri plasmid or the different Ri plasmid, optionally wherein the additional sequence is about 100, 500, 1,000, 1,500 or 2,000 base pairs to about 2,500, 3,000, or 3,500 base pairs in length.

75. The disarmed Agrobacterium rhizogenes strain of claim 74, wherein the additional sequence is a nucleotide sequence that confers antibiotic resistance (e.g., an antibiotic resistance cassette), optionally wherein the additional sequence is a gentamicin resistance cassette.

76. The disarmed Agrobacterium rhizogenes strain of any one of claims 62-75, wherein the Ri plasmid of the disarmed Agrobacterium rhizogenes strain comprises a sequence having a sequence identity of about 70%, 75%, 80%, 85%, 90%, 95%, 96%, 97%, 98%, 99%, or more to SEQ ID NO:65 and/or a sequence having a sequence identity of about 70%, 75%, 80%, 85%, 90%, 95%, 96%, 97%, 98%, 99%, or more to SEQ ID NO:66, optionally wherein the Ri plasmid of the disarmed Agrobacterium rhizogenes strain comprises a sequence of SEQ ID NO:65 and/or a sequence of SEQ ID NO:66.

77. The disarmed Agrobacterium rhizogenes strain of any one of claims 62-76, wherein the Ri plasmid of the disarmed Agrobacterium rhizogenes strain comprises a sequence having a sequence identity of about 70%, 75%, 80%, 85%, 90%, 95%, 96%, 97%, 98%, 99%, or more to SEQ ID NO:64, optionally wherein the Ri plasmid of the disarmed Agrobacterium rhizogenes strain comprises a sequence of SEQ ID NO:64.

78. The disarmed Agrobacterium rhizogenes strain of any one of claims 62-77, wherein the Ri plasmid of the disarmed Agrobacterium rhizogenes strain comprises a sequence having a sequence identity of about 70%, 75%, 80%, 85%, 90%, 95%, 96%, 97%, 98%, 99%, or more to SEQ ID NO:70, optionally wherein the Ri plasmid of the disarmed Agrobacterium rhizogenes strain comprises a sequence of SEQ ID NO:70.

79. The disarmed Agrobacterium rhizogenes strain of any one of claims 62-78, further comprising a tumor-inducing (Ti) plasmid that comprises a non-Agrobacterium rhizogenes origin of replication, optionally wherein the Ti plasmid comprises an Agrobacterium tumefaciens origin of replication.

80. The disarmed Agrobacterium rhizogenes strain of any one of claims 62-79, wherein the disarmed Agrobacterium rhizogenes strain is Agrobacterium rhizogenes strain DS101.1.

81. The disarmed Agrobacterium rhizogenes strain of any one of claims 62-80, wherein the disarmed Agrobacterium rhizogenes strain is frozen and/or lyophilized.

82. A composition comprising the disarmed Agrobacterium rhizogenes strain of any one of claims 62-81.

The application's sequence listing, which the Patent Office published only in electronic form, follows.

SEQUENCE LISTING (82 sequences)

SEQ ID NO: 1 - DNA, 1592 bp, Medicago truncatula
actgttaataatttttaaacgtcagcgcactaaaaaaacgaaaagacggacacgtgaaaataaaaaacacacactagtttatgacgcaatactattttacttatgatttgggtacattagacaaaaccgtgaaagagatgtatcagctatgaaacctgtatacttcaatacagagacttactcatatcggatacgtacgcacgaagtatcatattaattattttaatttttaataaatattttatcggatacttatgtgatactctacatatacacaaggatatttctaagatactttatagatacgtatcctagaaaaacatgaagagtaaaaaagtgagacaatgttgtaaaaattcattataaatgtatatgattcaattttagatatgcatcagtataattgattctcgatgaaacacttaaaattatatttcttgtggaagaacgtagcgagagaggtgattcagttagacaacattaaataaaattaatgttaagttcttttaatgatgtttctctcaatatcacatcatatgaaaatgtaatatgatttataagaaaatttttaaaaaatttattttaataatcacatgtactattttttaaaaattgtatcttttataataatacaataataaagagtaatcagtgttaatttttcttcaaatataagttttattataaatcattgttaacgtatcataagtcattaccgtatcgtatcttaatttttttttaaaaaccgctaattcacgtacccgtattgtattgtacccgcacctgtatcacaatcgatcttagttagaagaattgtctcgaggcggtgcaagacagcatataatagacgtggactctcttataccaaacgttgtcgtatcacaaagggttaggtaacaagtcacagtttgtccacgtgtcacgttttaattggaagaggtgccgttggcgtaatataacagccaatcgatttttgctataaaagcaaatcaggtaaactaaacttcttcattcttttcttccccatcgctacaaaaccggttcctttggaaaagagattcattcaaacctagcacccaattccgtttcaaggtataatctactttctattcttcgattattttattattattagctactatcgtttaatcgatcttttcttttgatccgtcaaatttaaattcaattagggttttgttcttttctttcatctgattgaaatccttctgaattgaaccgtttacttgattttactgtttattgtatgatttaatcctttgtttttcaaagacagtctttagattgtgattaggggttcatataaatttttagatttggatttttgtattgtatgattcaaaaaatacgtcctttaattagattagtacatggatattttttacccgatttattgattgtcagggagaatttgatgagcaagtttttttgatgtctgttgtaaattgaattgattataattgctgatctgctgcttccagttttcataacccatattcttttaaccttgttgtacacacaatgaaaaattggtgattgattcatttgtttttctttgttttggattatacagg

SEQ ID NO: 2 - DNA, 2000 bp, Zea mays
gtcgtgcccctctctagagataaagagcattgcatgtctaaagtataaaaaattaccacatatttttttgtcacacttatttgaagtgtagtttatctatctctatacatatatttaaacttcactctacaaataatatagtctataatactaaaataatattagtgttttagaggatcatataaataaactgctagacatggtctaaaggataattgaatattttgacaatctacagttttatctttttagtgtgcatgtgatctctctgttttttttgcaaatagcttgacctatataatacttcatccattttattagtacatccatttaggatttagggttgatggtttctatagactaatttttagtacatccattttattctttttagtctctaaattttttaaaactaaaactctattttagttttttatttaataatttagatataaaatgaaataaaataaattgactacaaataaaacaaataccctttaagaaataaaaaaactaagcaaacatttttcttgtttcgagtagataatgacaggctgttcaacgccgtcgacgagtctaacggacaccaaccagcgaaccagcagcgtcgcgtcgggccaagcgaagcagacggcacggcatctctgtagctgcctctggacccctctcgagagttccgctccaccgttggacttgctccgctgtcggcatccagaaattgcgtggcggagcggcagacgtgaggcggcacggcaggcggcctcttcctcctctcacggcaccggcagctacgggggattcctttcccaccgctccttcgctttcccttcctcgcccgccgtaataaatagacaccccctccacaccctctttccccaacctcgtgttcgttcggagcgcacacacacgcaaccagatctcccccaaatccagccgtcggcacctccgcttcaaggtacgccgctcatcctccccccccccctctctctaccttctctagatcggcgatccggtccatggttagggcccggtagttctacttctgttcatgtttgtgttagagcaaacatgttcatgttcatgtttgtgatgatgtggtctggttgggcggtcgttctagatcggagtaggatactgtttcaagctacctggtggatttattaattttgtatctgtatgtgtgtgccatacatcttcatagttacgagtttaagatgatggatggaaatatcgatctaggataggtatacatgttgatgcgggttttactgatgcatatacagagatgctttttttctcgcttggttgtgatgatatggtctggttgggcggtcgttctagatcggagtagaatactgtttcaaactacctggtggatttattaaaggataaagggtcgttctagatcggagtagaatactgtttcaaactacctggtggatttattaaaggatctgtatgtatgtgcctacatcttcatagttacgagtttaagatgatggatggaaatatcgatctaggataggtatacatgttgatgcgggttttactgatgcatatacagagatgctttttttcgcttggttgtgatgatgtggtctggttgggcggtcgttctagatcggagtagaatactgtttcaaactacctggtggatttattaattttgtatctttatgtgtgtgccatacatcttcatagttacgagtttaagatgatggatggaaatattgatctaggataggtatacatgttgatgtgggttttactgatgcatatacatgatggcatatgcggcatctattcatatgctctaaccttgagtacctatctattataataaacaagtatgttttataattattttgatcttgatatacttggatgatggcatatgcagcagctatatgtggattttttagccctgccttcatacgctatttatttgcttggtactgtttcttttgtccgatgctcaccctgttgtttggtgatacttc

SEQ ID NO: 3 - DNA, 4101 bp, Artificial sequence
  Synthetic polynucleotide
gacaagaagtactccattggcctggcgattgggacaaactcggtggggtgggccgtgattacggatgagtacaaggttccaagcaagaagttcaaggtcctcgggaacacagatcggcattcgattaagaagaatctcattggggcgctcctcttcgactcgggggagacagcggaggctaccaggctcaagcggacagccaggcggcggtacacaaggcggaagaatcgcatctgctacctccaggagattttctcgaatgagatggcgaaggtggacgacagcttcttccatcggctggaggagtccttcctggtggaggaggataagaagcacgagaggcatccaattttcgggaacatcgtggacgaggttgcgtaccatgagaagtaccctacaatctaccatctgcggaagaagctggttgactccacagacaaggcggacctgaggctgatctacctcgctctggcccacatgattaagttccgcgggcatttcctgatcgagggggacctgaatcccgacaattcggatgtggacaagctcttcatccagctggtgcagacctacaaccagctgttcgaggagaatcccatcaatgcgtcgggcgttgacgctaaggccattctgtccgctaggctgtcgaagagcaggaggctggagaacctgatcgcccagctgccaggcgagaagaagaatgggctcttcgggaatctgattgcgctctccctggggctgacaccgaacttcaagagcaatttcgatctggctgaggacgcgaagctccagctctcgaaggacacttacgacgatgacctcgataacctcctcgcgcagatcggggaccagtacgctgatctcttcctcgccgctaagaacctctcggatgctatcctgctctccgacattctccgggttaataccgagattacaaaggccccactgtcggcgtccatgatcaagcggtacgatgagcatcatcaggatctcaccctgctcaaggccctcgtgcggcagcagctgcccgagaagtacaaggagattttcttcgaccagagcaagaatgggtacgctggctacattgacggcggggcctcacaggaggagttctacaagttcatcaagccaatcctggagaagatggatgggacagaggagctgctggtgaagctcaaccgggaggatctgctcaggaagcagcggacgttcgacaacgggtcgattccccatcagatccacctgggggagctgcacgcgatcctgcgccggcaggaggatttctaccctttcctgaaggataatcgggagaagatcgagaagattctcaccttccggattccctactacgtcgggccactcgcgcggggcaatagcaggttcgcctggatgacacggaagagcgaggagacaatcaccccctggaacttcgaggaggttgtcgacaagggggcgtccgcccagtcattcattgagcggatgaccaatttcgacaagaatctgccaaatgagaaggttctcccaaagcatagcctcctctacgagtacttcactgtttacaacgagctgaccaaggtgaagtatgtgaccgagggcatgcggaagcccgcgttcctgtccggcgagcagaagaaggccattgtggacctcctgttcaagaccaatcgcaaggtcacagtcaagcagctcaaggaggattacttcaagaagatcgagtgcttcgactcggttgagattagcggggtggaggatcggttcaacgcgagcctcggcacttaccacgacctcctgaagatcatcaaggataaggacttcctcgacaacgaggagaacgaggatattctggaggacatcgtgctcaccctgacgctgttcgaggatcgggagatgatcgaggagcgcctgaagacctacgctcatctcttcgatgataaggtcatgaagcagctgaagaggaggcggtacaccgggtggggccgcctgagcaggaagctcattaacgggatcagggacaagcagagcggcaagaccatcctggacttcctcaagagcgatggcttcgccaaccggaatttcatgcagctcatccacgacgactccctcaccttcaaggaggacattcagaaggctcaggtcagcggccagggcgactcgctgcatgagcacatcgctaacctggcgggcagcccagccatcaagaagggcatcctccagacagtgaaggtcgtggatgagctggtgaaggtcatgggccggcataagcccgagaatattgtgattgagatggcgcgggagaatcagaccactcagaagggccagaagaactcgcgggagcgcatgaagaggatcgaggaggggattaaggagctgggcagccagattctcaaggagcaccccgtggagaatacccagctccagaacgagaagctgtacctctactacctccagaatgggcgggacatgtatgttgatcaggagctggacatcaatcgcctctcggattacgacgtggaccacatcgtgccccagagcttcctgaaggatgatagcatcgacaataaggtcctgacccgctccgacaagaatcgcggcaagagcgacaacgtgccgagcgaggaggtcgtgaagaagatgaagaactactggcggcagctgctgaacgcgaagctcattacacagcggaagttcgataacctgacgaaggcggagaggggcggcctctccgagctggacaaggcgggcttcattaagaggcagctcgtggagactcgccagatcaccaagcacgtggctcagatcctcgatagccggatgaatacgaagtacgatgagaatgacaagctcatccgggaggtgaaggtaatcaccctgaagtcaaagctcgttagcgatttccggaaggacttccagttctacaaggtgcgggagattaacaactaccatcatgcgcacgatgcgtacctcaatgcggtggtgggcacagccctgattaagaagtaccccaagctggagagcgagttcgtctacggggactacaaggtgtacgatgttcggaagatgatcgccaagagcgagcaggagattgggaaggccaccgctaagtacttcttctactcgaatattatgaatttcttcaagaccgagatcacactcgctaatggggagattcggaagcggcccctcatcgagactaacggggagactggcgagattgtgtgggacaaggggcgcgacttcgctaccgtgcgcaaggtcctctcgatgccccaggttaatattgttaagaagacagaggtgcagacgggcgggttctccaaggagtctatcctgccgaagcggaactcggacaagctgatcgcccgcaagaaggattgggaccccaagaagtacgggggattcgatagcccaaccgtggcttacagcgtcctggtggtcgccaaggttgagaaggggaagtcgaagaagctcaagagcgttaaggagctgctgggcatcaccatcatggagcggtccagcttcgagaagaatcctatcgacttcctggaggctaaggggtacaaggaggtcaagaaggacctgatcattaagctgcccaagtactctctgttcgagctggagaacgggaggaagcggatgctggcgtctgctggcgagctacagaagggcaatgagctggcgctcccctcgaagtatgtcaacttcctctacctggcttcccattacgagaagctgaagggctcgcccgaggataatgagcagaagcagctcttcgtggagcagcacaagcactacctcgacgagatcattgagcagatttcggagttctcgaagcgggtcattctcgcggacgcgaacctcgacaaggtcctctcggcgtacaacaagcaccgggacaagcccatccgggagcaggccgagaacattatccacctcttcacactgaccaacctcggcgctcccgccgcgttcaagtacttcgacaccaccattgaccgcaagagatacacatccaccaaggaggtgctggacgcgaccctcatccaccagagcatcacaggcctctacgagacacggatcgacctctcgcagctcgggggcgat

SEQ ID NO: 4 - DNA, 4092 bp, Artificial sequence
  Synthetic polynucleotide
gacaagaagtactcgatcggcctggcgattggcacaaacagcgtggggtgggctgtgatcactgatgagtacaaggtgccatcgaagaagttcaaggtgctggggaatacagaccggcattcgatcaagaagaatctcattggcgctctcctcttcgattccggcgagactgctgaggcgacccgcctgaagcgcaccgcccggcggcgctacactcggcggaagaataggatttgctacctccaggagattttctcgaatgagatggccaaggtggatgacagcttcttccaccgcctggaggagtcgttcctggtcgaggaggacaagaagcatgagcggcaccctatcttcgggaatatcgttgatgaggtcgcctaccacgagaagtaccccactatctaccatctccgcaagaagctcgtggacagcacagataaggccgacctccgcctgatctacctcgccctcgcgcacatgattaagttccgggggcacttcctcattgagggggatctgaatcccgataactccgacgtggacaagctgttcatccagctggtgcagacatacaaccagctgttcgaggagaatcccatcaacgcgagcggcgtggacgctaaggccattctgtcggctaggctctcgaagtcgaggcggctggagaacctgattgcgcagctccccggcgagaagaagaacgggctgttcgggaatctcatcgccctctccctcggcctcacaccaaacttcaagagcaatttcgacctggctgaggacgctaagctgcaactctcaaaggatacatacgatgacgacctggacaatctcctggctcagatcggcgaccagtacgctgacctgttcctcgcggccaagaatctgtcggacgcgattctcctcagcgacatcctgcgcgtcaataccgagattacgaaggctccactgtctgcgtcaatgattaagcggtacgatgagcatcaccaggatctgaccctcctgaaggcgctcgtgcggcagcagctgcccgagaagtacaaggagattttcttcgatcagagcaagaatggctacgccggctacatcgacgggggcgcgagccaggaggagttctacaagttcatcaagcccatcctggagaagatggacggcaccgaggagctactcgtgaagctcaatcgggaggatctcctccggaagcagcggacattcgataacgggtctatcccacaccagatccacctcggcgagctgcatgcgattctgcggcggcaggaggatttctaccctttcctgaaggacaaccgggagaagatcgagaagatcctcacattccggattccatactacgtcggccccctggcgaggggcaatagccggttcgcgtggatgacaaggaagtccgaggagactattaccccgtggaatttcgaggaggtggttgacaagggcgcttccgcgcagagcttcattgagcggatgacaaacttcgacaagaatctccccaacgagaaggtcctgccgaagcatagcctcctgtacgagtacttcaccgtctacaatgagctaactaaggtcaagtatgtgacagagggcatgaggaagccagccttcctctcaggcgagcagaagaaggccattgtggacctcctgttcaagacaaaccgcaaggtgacagtgaagcagctgaaggaggattacttcaagaagattgagtgcttcgactcagtggagatttcaggcgtggaggatcggttcaacgcgagcctggggacttaccacgacctgctgaagattattaaggacaaggacttcctggataacgaggagaatgaggacatcctggaggatattgtgctcaccctcaccctgttcgaggacagggagatgattgaggagaggctcaagacctacgcgcacctgttcgatgacaaggtcatgaagcagctgaagaggcggcgctacactgggtggggccgcctgtcgcggaagctgatcaacggcattcgggataagcagtccgggaagaccattctggatttcctgaagtcggacggcttcgccaacaggaatttcatgcagctgatccacgacgactccctcaccttcaaggaggacattcagaaggcccaggttagcggccagggggactcactccacgagcatattgccaatctggccggctctccagctatcaagaagggcatcctgcaaacagttaaggttgttgacgagctggttaaggtcatggggcggcataagcccgagaacattgtcatcgagatggctcgggagaaccagacaactcagaagggccagaagaactccagggagcgcatgaagcggattgaggagggcattaaggagctggggtcccagatcctcaaggagcaccctgtcgagaacactcagctgcaaaacgagaagctctacctgtactacctccagaacgggcgggatatgtatgtggatcaggagctggacatcaacaggctctccgactacgacgtggatcacattgtcccacagtctttcctcaaggatgattccatcgacaacaaggtgctgacgcgcagcgacaagaatagggggaagtcggacaacgttccgagcgaggaggtcgtgaagaagatgaagaattactggaggcagctcctgaatgcgaagctgatcactcagaggaagttcgacaatctgacaaaggcggagaggggcgggctctcggagctggataaggcgggcttcatcaagcggcagctcgttgaaacccggcagatcaccaagcatgtcgcccagatcctcgatagccgcatgaacaccaagtacgatgagaacgacaagctcattcgggaggttaaggtcattacgctgaagtccaagctcgtcagcgacttcaggaaggatttccagttctacaaggttcgggagattaacaactaccaccacgcgcatgatgcgtacctgaacgctgttgtcggcactgctctcatcaagaagtacccaaagctggagtccgagttcgtctacggggactacaaggtctacgatgtccggaagatgatcgccaagtcggagcaggagatcgggaaggctactgcgaagtacttcttctacagcaacattatgaatttcttcaagacggagattacgctggcgaacggggagattaggaagaggcccctcattgagactaatggggagacaggcgagattgtttgggacaagggccgcgacttcgcgactgtgcggaaggtcctgtccatgccacaggtgaatattgttaagaagacagaggtgcagactgggggcttctcgaaggagagcattctcccaaagcggaacagcgataagctcatcgcgcgcaagaaggattgggaccctaagaagtacggcggcttcgattctcccactgtggcctactccgttctcgtggttgccaaggttgagaaggggaagtcgaagaagctgaagtcggtcaaggagctgctcgggattacaatcatggagcggagcagcttcgagaagaaccctattgatttcctggaggccaagggctacaaggaggttaagaaggatctcattatcaagctccctaagtactctctgttcgagctggagaatggccggaagaggatgctggcctcggctggcgagctacagaaggggaatgagctggccctcccgtcgaagtatgtgaatttcctgtacctcgcgtcgcactacgagaagctcaagggcagcccggaggataatgagcagaagcagctcttcgtggagcagcataagcactacctggacgagatcattgagcagatcagcgagttctcgaagcgggttattctggctgatgctaacctggacaaggttctgagcgcctacaataagcatcgcgacaagccgattcgcgagcaggcggagaatattatccacctgttcaccctcactaacctcggggctcccgcggccttcaagtacttcgataccacaatagataggaagcggtacacctcgacgaaggaggtcctcgacgccacactcatccatcagtcgattacaggcctgtacgagacacggattgacctctcgcagctg

SEQ ID NO: 5 - DNA, 4101 bp, Artificial sequence
  Synthetic polynucleotide
gacaagaagtattccataggcctggctatcggcaccaacagcgtgggctgggccgtcatcaccgacgagtacaaagtgccgagtaaaaagttcaaagtgctcggcaacaccgaccgccactccataaagaaaaacctgatcggggcgctcctgttcgacagcggcgagacggcggaggccacccgcttgaaacgcacggcccgacggcgctacacgcggcgcaagaaccggatctgttacctacaggagattttctctaacgagatggcgaaggtggacgactcgttctttcaccgcctcgaagagtccttcctcgtggaggaggacaagaaacacgagcgccacccgatcttcggcaacatcgtggacgaggtggcctaccacgagaagtacccgaccatctaccacctccggaagaaactcgtggacagcacggacaaggccgacctgaggctcatctacctcgccctggcgcacatgattaagttccggggccacttcctgatcgagggcgacctgaacccggacaacagcgacgtggacaagctgttcatccagctagtccagacctacaaccagcttttcgaggaaaaccccatcaacgccagcggggtggacgcgaaggcgatcctgtccgcccggctgagcaagtcccggcggctggagaacctcatcgcgcagttgcccggcgagaagaagaacgggctgttcgggaacctgatcgccctctccctggggctcaccccgaacttcaagtccaacttcgacctcgccgaggacgccaaactacagctgagcaaggacacctacgacgacgacctcgacaacctgctggcccagatcggggaccagtacgcagacctgttcctcgccgccaagaacctctccgacgccatcctgctgtcggacatcctgcgggtgaacacggagatcacgaaggccccgctctcggcctcgatgattaaacgctacgacgagcaccaccaggacttgaccctcctcaaggcgctggtccgccagcagcttcccgagaagtacaaggaaatctttttcgatcagagcaagaacgggtacgccgggtacatcgacggcggggcgtcccaggaggagttctacaagttcatcaagcccatcctggagaaaatggacgggaccgaggagctgctcgtgaagctcaaccgcgaagatttgctccgcaagcagcgcacgttcgacaacgggtcgatcccgcaccagatccacctgggcgagctgcacgcgatcctcaggcgtcaggaagacttctaccccttcctcaaggacaaccgcgagaagatagagaagattctgaccttcagaattccttattacgtgggcccgctggctcggggcaactcgcgcttcgcctggatgacgcgcaagtccgaggagaccatcaccccgtggaacttcgaggaggtggtggataagggtgcctcggcccagtccttcatcgagcggatgaccaacttcgacaagaacctgccgaacgagaaggtgctccccaagcacagcctgctctacgaatatttcacggtgtacaacgagctgacgaaggtcaagtacgtgaccgagggaatgaggaaacctgcattcctctccggggagcagaagaaagccatagtcgacctcctgttcaagaccaaccggaaggtcaccgtcaagcagctcaaggaggactacttcaagaagatcgagtgcttcgattcagtggagatcagcggcgtcgaggaccggttcaacgccagcctgggcacctaccacgacctgctcaagatcatcaaggacaaggacttcctcgacaacgaggagaacgaggacatcctggaggacatcgtgctgaccctgacgctcttcgaggaccgcgagatgatcgaggagcgcctcaagacctacgcccacctgttcgacgacaaggtgatgaagcagctcaagcggcggagatatactgggtggggccgcctctcccggaagctcattaacggtatcagggataagcagtccgggaagacgatcctcgacttcctcaagtcggacgggttcgccaaccgcaacttcatgcagctcatccacgacgactccctgacgttcaaggaggacatccagaaggcccaagtgtctggtcaaggtgactcgctccacgagcacatcgccaacctcgcgggcagcccggccatcaagaagggaatactccagaccgtcaaggtggtggacgagctggtgaaggtcatgggccgccacaagccggagaacatcgtcatcgagatggcgcgggagaaccagaccacgcagaaggggcagaaaaatagccgtgagcgcatgaagcgcatcgaggaggggattaaggagttgggcagccagatcctcaaggagcaccctgtggagaacacgcagttgcaaaacgagaagctctacctgtactacctccagaacgggagggatatgtacgtggaccaagaactggacatcaaccgcctgtccgactacgacgtggaccacatcgtgccgcagagcttcctcaaggacgacagcatcgacaacaaggtgctcacccggtccgacaagaatcggggcaagtccgacaacgtgcccagcgaggaggtcgtcaaaaagatgaaaaactactggcgacaactactgaacgccaagctcatcacccagcgcaagttcgacaacctcacaaaagccgagcgcggcgggttgagcgagctggacaaggccgggttcatcaagcgccagctcgtcgagacgcgccagatcacgaagcacgtcgcgcagatactcgacagccggatgaacaccaagtacgacgagaacgacaagctcatccgggaggtgaaggtcatcaccctcaagtcgaagctcgtgagcgacttccgcaaggacttccagttctacaaggtccgggagatcaacaactaccaccacgcccacgatgcttatcttaacgccgtggtggggacggccctcattaagaaatacccgaagctggagtcggagttcgtgtacggcgactacaaggtgtacgacgtcaggaagatgatcgccaagtccgaacaggagatcgggaaggccacggcgaaatacttcttctacagcaacatcatgaacttcttcaagaccgagatcaccctcgccaacggcgagatccgcaagcgcccgctcatcgagacgaacggggagaccggcgagatcgtctgggacaaggggcgcgacttcgccactgtgcggaaggtgctgtcgatgccccaggtcaacatcgtcaagaagacggaggtccagacgggcgggttcagcaaggagagcatcctgccgaagcgcaacagcgacaagctgatcgcccgcaaaaaggactgggatccaaaaaagtacggcggcttcgacagccccaccgtcgcctacagcgtcctcgtcgtcgctaaagtcgagaagggcaagtccaaaaagctcaagagcgtcaaggagctgctcgggatcaccatcatggagcggtccagcttcgagaagaacccaattgatttcctggaggcgaagggctacaaggaggtcaagaaagacctcatcataaagctgccgaagtactcactcttcgagctggagaacgggcgcaagcggatgctggcgtcggccggagagctccaaaagggcaacgagctggcgctgccgagcaagtacgtgaacttcctctacctggcgtcccactacgagaagctcaagggcagtccagaggataacgagcagaagcagctattcgtggagcagcacaagcactacctggacgagatcatcgagcagatcagcgagttctccaagcgcgtcatcctggcggacgccaacctggacaaggtgctgtccgcgtacaacaagcaccgcgacaagccgatccgcgagcaagccgagaacatcatccacctgttcaccctcacgaacctcggggcacccgccgccttcaaatatttcgacacgaccatcgaccgcaagcgctacaccagcacgaaggaggtgctcgacgccaccctgatccaccagagcatcaccgggctgtacgagacccgcatcgacctctcgcagctcggcggggac

SEQ ID NO: 6 - DNA, 4101 bp, Artificial sequence
  Synthetic polynucleotide
gacaagaagtacagtattggattggccatcgggacgaacagcgtgggctgggccgtcatcaccgacgagtacaaggtgccatccaagaagtttaaggttctggggaataccgaccgccactcgatcaagaaaaatctcatcggggcgctgcttttcgacagcggcgagacggcggaagcgacgcggctcaagcggacggctcgtcgccgttacacccggcgtaagaaccgcatctgttacctccaggagatattcagcaacgagatggcgaaggtggacgactcctttttccaccgtcttgaggagtccttcctggtcgaggaggacaagaagcacgagcgccacccgatcttcgggaacatcgtggacgaggtggcctaccacgagaagtaccccacgatctaccacctccgcaaaaaactcgtggactcaactgacaaggccgatttgaggcttatctacctcgccctcgcccacatgattaagttccgtgggcacttcctaatcgagggtgacctcaaccccgacaactctgacgtggacaagctgttcatccagcttgtgcagacctacaatcagctctttgaggagaatccgatcaacgcatctggtgtggacgcaaaggccatcctcagcgcgcggctgagcaagtctaggcggttggagaacctgatcgcccaactgcccggcgagaagaaaaatggcctcttcggcaacctgatcgccctgtcgctggggctcacgccgaacttcaagagtaactttgacctggcggaggacgctaagctccagctatctaaggacacatacgacgacgacctggacaacctgctggcccagatcggcgaccagtacgccgacctcttcctagccgccaagaacctgtccgacgccatcctcctcagcgacatcctgcgcgtgaacacggagatcacgaaggctccgctcagcgcctccatgattaagcggtacgacgagcaccaccaagacctaactttactcaaagccctcgtgcggcagcagcttcccgagaagtacaaagagatattttttgatcagtccaagaacggttatgcgggctacatcgacggcggcgcgagccaggaggagttctacaagttcatcaagcccatcctggagaagatggacggcacggaggagctgctcgtgaagctcaaccgtgaagacctcctgcgaaagcagcgaaccttcgacaacggttcgatcccgcaccagatccacctcggggagctgcacgccatcctgaggcgacaggaggacttctaccctttcctaaaggacaaccgcgagaagattgaaaaaatcctgacgtttcgcataccctactacgtcggcccgctggcgcgcggcaactcccggttcgcctggatgacccgtaagagcgaggagacgatcaccccgtggaacttcgaggaggtcgtggacaagggcgcgagcgcgcagagcttcatcgagcgcatgaccaacttcgacaagaacctcccgaacgagaaggtgctcccaaagcactccctcctgtacgagtatttcaccgtgtacaacgagttgacaaaggtgaagtacgtgacggagggaatgcggaagcctgcgttcctctcgggcgagcagaagaaggcaatcgtggacctgctcttcaagaccaaccggaaggtgacggtgaagcagctcaaggaggactacttcaaaaaaatcgagtgcttcgactccgtggagataagcggcgtggaggaccgattcaacgcctccctcggcacctaccacgacctccttaagatcatcaaggacaaggacttcctggacaacgaggagaacgaggacatcctggaggacatcgtgctcaccctgaccctcttcgaggaccgggagatgatcgaggagcgcctcaagacgtacgcccacttgttcgacgacaaggtgatgaagcagctcaagcggcggcgatacaccgggtggggccgcctatcccgcaaacttatcaacggcatccgcgacaagcagtccggcaagacgatcctggatttcctcaagtcggacgggttcgccaaccggaacttcatgcagctcatccacgacgacagcctcacgttcaaggaggacatccagaaggcccaagtgagcggtcaaggggacagcctccacgagcacattgcgaaccttgctgggagccctgcgatcaagaaggggatattgcaaaccgtgaaggtcgtggacgagttggtgaaggtcatggggcgacacaagcccgagaacatcgtgatcgagatggccagggaaaatcagaccacgcagaagggccaaaaaaacagccgcgagcggatgaagcggatcgaggagggcatcaaggagctggggtcgcagatcctcaaggagcacccggtggagaacacgcagctccagaacgagaagctgtacctctattacctacagaacgggcgggatatgtacgtggaccaggagctagacatcaaccgcctgtccgactacgacgtggaccatatcgtcccgcagtcgttcttgaaggacgacagcatcgacaacaaggtgctcacaagatcggataagaatcgaggcaagtccgacaacgtgccctcggaggaggtggtcaagaaaatgaaaaactactggcggcagttgctgaacgccaagctcattacgcagcggaagttcgacaacctgacgaaggctgaacgtggtgggctcagcgagctagacaaggcggggttcatcaagcggcagctcgtcgagacccggcagatcaccaagcacgtggcgcagatcctggactcgcgcatgaacaccaagtacgacgagaacgacaagctcatccgtgaggtgaaggtcatcacccttaagtctaagctggtcagtgacttccgcaaggacttccagttctacaaggtccgggagatcaacaactaccaccacgcgcacgacgcctacctcaacgcggtggtggggacggcgcttattaagaaatatcccaagctggaaagcgagttcgtttacggcgactacaaggtgtacgacgtccgcaagatgatcgcaaagtcggaacaggaaatcggaaaggcgacggccaaatatttcttttactccaacatcatgaatttttttaagacggagatcaccctggcgaacggggagatccgcaagcggcccctcatcgagaccaacggggagacgggcgagatcgtctgggacaagggccgggacttcgccaccgtgcggaaggtgctttctatgcctcaagtcaatatcgtcaaaaagacagaggtgcagaccggcgggttcagcaaggagtctatcctgccgaagcgcaactcggacaagctcatcgcgcgcaagaaagactgggaccccaaaaaatatggcgggttcgactcgccgaccgtcgcctacagcgtcctcgtggtggctaaggtcgagaagggcaagagcaaaaagctaaagtcggtgaaggagctgctgggcatcaccatcatggagcgctcgtctttcgagaagaatccaatcgacttcctagaggcgaaggggtacaaggaggtcaaaaaggatcttatcatcaaactgccgaagtacagtctgttcgagctggagaacgggcggaagcggatgctggctagtgcgggcgagttgcagaagggcaacgagttggcactgccctccaagtacgtgaacttcctgtacctggcctcccactacgagaagctcaaggggagccccgaggacaacgagcagaagcagctattcgtcgagcagcacaagcactacctggacgagatcatcgagcagatcagtgagttctccaagcgggtcatcctcgcggacgccaacctggacaaggtgctgagcgcgtacaacaagcacagggacaagccaatcagggaacaggccgagaacatcatccacctgttcaccctgaccaacctgggtgcaccggctgccttcaagtactttgacacgaccatcgaccggaagcgctacacctccacgaaggaggtgctggacgccacgctgatccaccagagcatcaccgggctctacgagacacggatcgacctgagccagcttggcggggac

SEQ ID NO: 7 - DNA, 4092 bp, Artificial sequence
  Synthetic polynucleotide
gacaaaaagtattccattggactcgctatcggcacgaacagcgtcgggtgggcggtcatcactgacgagtacaaggtgccgagcaagaagtttaaggtgctgggaaacaccgacaggcactcgatcaagaaaaatcttatcggggccctactcttcgactccggagaaaccgccgaggccacccggttgaagcgcacggcccgccgtcgctacaccaggcgcaagaaccggatctgctacctccaggagatattcagcaatgagatggcgaaggtggacgactcgttttttcacaggctagaggagtctttcctcgtggaggaggacaagaaacacgagcgccaccccatcttcggcaacatcgtggatgaggtggcatatcacgagaagtacccaaccatctaccacctccgcaaaaagctcgtggactctaccgacaaggccgacctccgtctgatctacctcgcgctggcccacatgattaagttccgaggacactttctgatcgagggcgacctgaacccagacaacagcgacgtggacaagctgttcatccaacttgtccagacctacaatcagctcttcgaggagaaccctatcaacgcctcgggcgtggacgcgaaggccatcctgtccgcccgcctgagcaagtcgcggcggctggagaacctgatcgcccagctccccggcgaaaaaaagaacggcctcttcggcaacctcatcgcgttgtcgctggggctcaccccgaacttcaagtccaacttcgacctggccgaggacgctaaactccagctctcgaaggatacctacgacgacgacctcgacaacctgctggcccagatcggcgaccagtacgcggaccttttcctggcggccaagaacctgagcgacgcgatcctccttagcgacatactccgtgtgaacaccgagatcacgaaggccccgctctccgcgtccatgattaagcgctacgacgagcaccaccaagaccttaccctgcttaaggcgctggtcaggcagcagttaccggagaagtacaaggagatcttttttgatcaatctaagaacggttacgccgggtacatcgacggcggcgcgtcccaggaggagttctacaagttcatcaagccgatcttggagaaaatggacgggaccgaggagctgctcgtgaagctcaaccgcgaagacctcctccgcaagcagcgcaccttcgacaacgggagcatcccgcaccagatccacctgggagagctgcacgcgatcctgcggagacaagaggacttctaccccttcctcaaggacaaccgggagaagattgaaaaaatacttacttttcgtatcccgtactacgtcgggccccttgcgaggggcaactccagattcgcgtggatgacccgcaagtccgaggagaccatcaccccgtggaacttcgaggaggtggtggacaagggcgcgtcggcccagtcgttcatcgagcgcatgaccaacttcgacaagaaccttccgaacgagaaggtgctcccgaagcacagcctgctctacgaatattttactgtgtacaacgagctgacgaaggtcaagtacgttacggaggggatgaggaagcccgccttcctctccggcgagcagaagaaagccattgtggatctcctgttcaagaccaaccgcaaggtgacggtgaaacagctcaaagaggactacttcaagaagatcgagtgcttcgactccgtagagatcagcggggtcgaggaccgcttcaacgcctcgctgggcacgtaccacgacctgctaaagattatcaaggacaaagacttcctagacaatgaggagaacgaggacattctggaggacatcgtgctgactctgacgctgttcgaagaccgcgagatgatcgaggagcggcttaagacgtacgcccacctgttcgacgacaaggtgatgaagcagttgaaacggcggcgctacaccgggtggggccgcctctcccgcaagctcatcaacggcatccgcgacaagcagtcggggaagacgatcctggacttcctcaagagcgacggcttcgccaaccgaaacttcatgcagctaatccacgacgacagcctgacgttcaaggaggacatccagaaggcccaagtgagcggccagggagactcgctacacgagcatatcgccaacctggctggcagcccggcgattaagaaaggaatcctccaaaccgtcaaagtggtggacgagctggtgaaggtgatgggccgccacaagcccgagaacattgtgatcgagatggcgcgggagaaccagacgacgcagaagggccaaaaaaatagcagggaaaggatgaagcgaatagaggaggggatcaaggagctggggagccagattctcaaagagcacccggtcgagaacacacagctccagaacgagaagctgtacctctactacctccaaaacggccgcgatatgtacgtggaccaggaactagacatcaaccggctgagcgactatgacgtggaccacatcgtgccgcagtccttcctcaaggacgactcgattgacaacaaagtgctcactagatccgacaagaacagaggcaagagcgataacgtcccgtcggaggaggtcgtcaagaaaatgaaaaactactggcggcagctcctaaacgccaagctcatcacgcagcgtaagttcgacaacctgacgaaggcggagcggggcgggctgagcgagctggacaaagcggggttcatcaagcggcagctcgttgagacgcggcagatcacaaagcacgtcgcgcaaatcctcgactcccgcatgaacaccaagtacgacgagaacgacaagctcatccgggaggtgaaggtcattacccttaaatcgaagctcgtcagcgactttcgtaaggacttccagttctacaaggtcagagagatcaacaactaccaccacgcccacgacgcctatctgaacgccgtggtgggcaccgcgcttattaagaagtaccccaagctggagtccgagttcgtgtacggcgactacaaggtttatgacgtcaggaagatgatcgccaagtcggaacaggagatcggaaaagctaccgccaaatatttcttctatagcaacatcatgaacttcttcaaaaccgagatcaccctcgccaacggcgagatccggaagcgcccgctcatcgagaccaacggggagaccggggagatcgtctgggacaaggggcgggacttcgctactgtccgaaaggtgctctccatgccacaagtgaatatcgtcaagaaaacagaggtgcagaccggagggttcagtaaggagtccatcctgcccaagcggaactccgacaagctaattgctcgcaaaaaggattgggatcctaaaaaatatggcggcttcgactcgcccacggtcgcctactctgtgctggtcgtggcgaaggtggagaagggcaagtccaagaagctcaagagcgtcaaggagctgctggggatcacgatcatggagcgtagttcgtttgagaagaatcccatcgacttcctggaggctaagggctacaaggaggtcaaaaaggacctcatcattaagctgccgaagtacagcctcttcgagctggagaacgggcggaagcgtatgctcgcctccgctggggagttacaaaaggggaacgagctggcgctgccgtctaagtacgtcaacttcctgtacctggcctcccactacgagaagctcaaggggtcgccggaggacaacgagcagaagcagctcttcgtagagcagcacaagcactacctggacgagatcatcgagcagatttcagagttctcaaagcgggtcatcctcgccgacgccaacctggacaaggtgctctcggcctacaacaagcaccgggacaagccgatccgcgaacaggccgaaaacatcatccacctgttcacgctcaccaacctcggtgccccggcggccttcaagtactttgacacgaccatcgaccggaagcgctatacctcgacgaaggaggtgctggacgccaccctgatccaccagtccatcaccgggctttacgagacccggatcgacctctcgcagcta

SEQ ID NO: 8 - DNA, 4101 bp, Artificial sequence
  Synthetic polynucleotide
gacaagaagtatagtattggactcgccatcggaaccaactctgtggggtgggctgttattacagatgaatataaggtgccatccaaaaagtttaaagttctgggcaatactgatagacactcaatcaagaagaatctgataggtgcacttctgtttgatagtggagagactgccgaggcaaccagacttaaaaggactgcaagaagaagatataccagaagaaagaataggatttgctatttgcaggaaatcttcagcaacgaaatggccaaggttgatgactcatttttccataggttggaggagagttttcttgtggaggaagataagaagcacgaaagacacccaattttcgggaatatagtggacgaggtggcttatcatgagaagtatcccactatctaccacctgagaaagaaacttgtggactcaaccgataaggctgatcttaggcttatatacttggcccttgcacatatgatcaaattcaggggccattttcttatcgaaggcgatcttaatcccgataactcagatgtggacaagctgtttatacaacttgtgcaaacctacaatcaactcttcgaggagaatcccattaacgcctccggcgtggatgcaaaagccatactgtcagccagactgagcaaaagtaggagactggagaatcttatagcccaactgcccggtgaaaagaagaatgggctcttcggaaatctgatcgctctttcattggggttgacacccaactttaagagtaactttgacttggcagaagatgcaaagttgcagctcagtaaagacacatatgacgatgaccttgacaatctcttggcacaaataggggatcaatacgctgaccttttcctcgctgccaagaacctcagcgacgctatactgttgtccgacattcttagggttaataccgaaattacaaaggcccctcttagtgcaagtatgatcaaaaggtatgatgagcatcaccaagaccttacactgctgaaggctctggttagacagcaactccctgaaaagtataaggaaatattcttcgaccaaagtaagaacgggtacgccggttatattgatgggggcgcaagtcaagaagaattttacaaattcatcaagccaattcttgaaaagatggacgggactgaggaattgctggtgaaactgaatagagaggaccttcttagaaaacagaggacatttgacaatgggtccatcccacaccagattcatctgggggaactccacgcaatattgaggagacaagaagacttttacccattccttaaggataatagagagaaaatcgaaaaaatcctgactttcaggattccttactatgttgggccactggccagggggaactcaagattcgcttggatgacaaggaagtcagaagaaaccataaccccttggaattttgaagaggtggttgataagggggcatcagcccagtctttcatagagaggatgaccaactttgataaaaatcttccaaatgagaaggttttgccaaaacatagtcttttgtacgagtactttactgtttataacgaattgaccaaggtgaagtatgtgaccgagggaatgaggaagccagcatttttgtccggggagcaaaagaaagcaatcgttgatcttctcttcaagaccaacagaaaagtgaccgtgaaacaactgaaggaagactacttcaaaaagatagaatgtttcgattcagtggaaattagcggtgttgaagacaggttcaatgcttcattgggtacttaccacgacctgttgaagataatcaaagacaaggactttctcgataatgaggagaacgaagacatcttggaagacattgtgcttacactcactttgtttgaggacagggaaatgattgaggaaagactcaaaacttacgctcatttgtttgatgataaggttatgaaacaactaaaaagaagaaggtacaccggctggggaagattgagtaggaaactgatcaacggtattagagataaacaatccggaaagactatcctcgatttccttaagagtgatggctttgcaaataggaattttatgcagctgattcatgacgactcacttaccttcaaagaagacatccaaaaagctcaggtgtctgggcaaggcgacagtctgcatgaacatatagctaacttggctgggagtcccgccatcaagaaggggatacttcaaacagttaaagttgtggacgaattggtgaaggtaatgggaaggcacaagcctgaaaatatagtgatagaaatggcaagggaaaatcaaacaacccagaagggacagaagaacagtagggaaaggatgaaaaggatagaagaggggatcaaagagcttggtagccagatcctcaaggaacatccagtggagaatacccaacttcaaaacgagaaactctatttgtactacttgcagaacggaagagatatgtatgtggaccaagagcttgatattaacaggctgagcgattatgacgttgaccacatagtgccccaatcattcctcaaggatgactctattgataataaggtgctgacaaggagtgacaagaatagagggaaatccgacaacgttccatccgaggaagttgtgaagaagatgaagaactactggaggcagttgctgaacgctaagctcattacccagaggaaattcgataacctgaccaaagcagagagaggcgggctgagcgaactcgataaagcaggtttcatcaagagacaactcgtggagactaggcaaattactaagcacgtggctcaaatactcgacagcaggatgaacacaaagtacgacgagaacgacaagctcattagagaggttaaggttattactctgaaaagtaaattggttagcgatttcagaaaggatttccaattctataaggttagagagatcaacaattatcatcatgcacatgatgcctatctgaatgctgtggttggtacagcccttatcaagaagtaccctaagctagagagcgagtttgtgtacggagattataaggtgtatgatgtgaggaaaatgatcgctaaaagtgagcaagagattggaaaggctaccgccaaatacttcttttattccaatattatgaatttcttcaagacagaaatcaccctggctaacggcgagataaggaagaggccgcttatcgaaactaatggggagacaggcgaaatagtgtgggacaaagggagggatttcgcaactgtgaggaaggttttgagcatgcctcaggtgaatatcgttaagaaaaccgaagttcaaactggagggttctctaaggaaagcattctccccaagaggaactccgacaagctgattgctagaaagaaagactgggaccccaagaagtatggcggattcgactcacccactgtggcatatagcgttctcgtggtggcaaaggttgaaaagggtaaatccaaaaaactcaaatccgtgaaggaactccttggcataactattatggaaaggagtagctttgaaaagaatcccatcgactttctcgaagctaagggctataaggaagttaagaaggaccttataatcaaacttccaaaatactccctttttgagttggaaaacggcagaaagagaatgttggccagtgccggggagcttcaaaagggcaacgaactggctctgcctagcaaatatgtgaactttttgtatctggcatcacactacgagaaacttaaaggctctcctgaggacaacgagcaaaaacagctctttgttgaacagcataagcactacctcgacgagattattgagcagatcagcgagttctcaaagagagttattctggctgacgctaatcttgacaaggttttgtccgcttacaacaaacacagggataagccaatcagggagcaggcagaaaacataatccatctctttaccctgacaaacctcggtgcccccgctgctttcaagtattttgatactaccattgacaggaagagatatacttccactaaggaagtgctcgacgcaaccctcatacaccaaagtatcacaggcctctatgaaactaggatagatttgtctcaacttgggggcgat

SEQ ID NO: 9 - DNA, 4101 bp, Artificial sequence
  Synthetic polynucleotide
gacaaaaagtattccatcgggcttgctatcggaaccaactctgtggggtgggcagttattaccgacgaatacaaggtgcccagcaagaagtttaaggttctggggaacacagatagacatagcataaagaaaaacctgataggcgcactgttgttcgactccggggaaacagccgaagctaccaggctgaagagaactgcaagaagaaggtacaccagaagaaaaaacagaatatgttatctccaagagattttctctaacgagatggccaaggtggacgactcattctttcacagactggaagaatctttccttgtggaagaagataagaaacacgagaggcaccctatttttggcaatatcgtggatgaggtggcttaccacgaaaaataccctacaatataccacctcaggaaaaaattggttgatagtacagacaaggccgacctcaggctcatctatttggccctggcccatatgattaaattcagggggcactttctcatcgagggagatttgaaccccgacaacagtgatgttgataagctctttattcagctcgtgcagacttacaatcagttgtttgaggaaaaccccattaatgcttccggggtggacgccaaggcaatcctttctgcaagactctcaaagtcaaggagactcgaaaatctgatagcacagcttccaggagagaagaagaacgggctctttggaaacctgatcgctctgtcactcggactcacacccaatttcaaaagcaattttgatttggcagaggacgctaagctgcaactcagtaaggatacctacgacgatgacttggataatctgctcgcacaaattggggaccagtatgcagacctgtttctcgcagctaagaacttgagtgacgccatattgctcagtgacatcctcagggttaataccgagattacaaaagctccactctctgcaagcatgatcaagaggtatgacgagcaccatcaagacctgacactccttaaggcgttggttaggcagcaacttcctgaaaagtataaggaaatcttcttcgatcaaagcaaaaacggctacgccggctatatagacgggggagcatcccaagaagaattttataagttcataaaacctatattggagaagatggacgggacagaggaattgctcgtgaaactgaacagggaggatctcctcaggaagcaaaggaccttcgacaatggctccatcccacatcagattcacctcggcgaactgcacgcaatactgagaagacaagaggacttttatcctttcctgaaggacaacagggagaaaatcgagaaaatcttgacattcagaatcccatactacgttgggcctctggccagaggtaacagtaggttcgcctggatgactaggaaatcagaggagactattacaccctggaactttgaagaagttgttgataagggagcttcagcacaatcattcatcgaaagaatgacaaactttgacaaaaatctgcctaatgagaaagtgctcccaaaacattccctgctgtatgagtattttaccgtttataacgagcttaccaaggtgaaatacgttactgaaggtatgagaaagccagcttttctttcaggggagcaaaagaaggctatcgtggatcttctctttaagaccaacagaaaggttaccgtgaagcagcttaaggaagactactttaaaaagatcgagtgttttgactcagtggaaataagcggtgttgaagatagattcaacgcatccttgggaacttatcatgatcttcttaagataatcaaggataaagactttctcgacaacgaggaaaacgaagatatactggaggacatagttctgacacttactttgttcgaggatagggagatgatcgaggaaagactgaaaacatatgctcaccttttcgacgacaaagttatgaaacaactcaagagaaggagatatacagggtgggggagattgagcaggaaactgattaatggtatcagagacaaacagtcaggaaaaacaatactcgactttttgaaatcagacgggttcgcaaataggaatttcatgcagcttatacacgacgattcacttacttttaaagaggacattcaaaaggctcaagttagtggacaaggtgactccctccacgaacacatcgcaaatctcgctggcagccctgcaattaagaagggtatactccagacagttaaggttgttgacgagctggttaaagtgatgggaagacacaaacccgagaacatagtgatagagatggccagggaaaaccaaaccactcaaaaagggcagaaaaattccagagagaggatgaaaaggattgaagaaggtatcaaggagctgggtagccaaattctgaaagaacatcctgtggaaaacactcaactccagaatgagaaactctatctgtactatctgcaaaatgggagagatatgtatgtggaccaggaactggacataaacaggctctcagattacgatgtggatcatatcgtgccacagtcctttcttaaggatgatagcatcgacaataaggtgcttaccaggtccgacaagaacaggggaaagtcagataacgtgccttctgaagaagttgttaaaaagatgaagaactactggagacagctgcttaacgctaagctcataacacagaggaagtttgacaacttgaccaaggccgagagaggcggactctcagaattggataaggcagggttcataaaaaggcagctggtggaaacaaggcagataactaaacatgtggctcagatcctcgatagtaggatgaatacaaaatacgatgagaacgacaagctcataagggaggttaaagtgataactctgaaatccaaactggttagcgattttaggaaggatttccagttttacaaagttagggagatcaacaattatcatcacgcccacgatgcctacttgaacgcagttgtgggtactgcacttatcaaaaagtaccctaagctggaatccgagtttgtttatggagactataaggtgtacgacgttagaaaaatgattgcaaagtcagagcaggagatagggaaagccactgcaaaatatttcttttatagcaatatcatgaatttctttaagacagaaatcacactggccaatggggaaataaggaagaggcccctgatcgaaactaatggcgagacaggggagattgtgtgggataaaggtagggactttgcaacagtgaggaaagtgctgagcatgccccaagttaatatcgttaaaaagaccgaggttcaaacagggggctttagtaaggaaagcattttgcccaagaggaatagtgacaaattgattgctaggaaaaaagattgggaccccaaaaagtatggcggatttgatagccccactgttgcttactccgtgctcgtggttgcaaaggtggagaagggaaagagcaagaaactgaagtcagttaaggaactccttggtatcactatcatggaaagaagctcctttgagaagaaccctattgacttcctggaggctaaagggtacaaagaggttaagaaagaccttatcattaaattgcccaaatatagtcttttcgagcttgaaaacggaagaaagaggatgcttgcatccgctggcgaattgcaaaagggcaatgagcttgctctcccttccaagtatgtgaacttcctttatcttgcctcacactatgaaaaactcaaaggttcacccgaagacaacgaacaaaagcaactatttgtggaacaacacaagcactacctggacgaaatcattgagcaaatttctgagttttcaaaaagggtaatcttggctgacgcaaatctcgacaaagttttgtcagcttacaacaaacatagagataagccaattagagagcaagctgagaatatcatccatctgtttaccctgactaaccttggagcgcctgctgcttttaaatatttcgacaccacaatcgacaggaagaggtacactagcactaaggaagttctcgacgccaccctcatccaccagagtattacaggcctgtacgagacaagaattgatctttctcaacttggtggtgac

SEQ ID NO: 10 - DNA, 4101 bp, Artificial sequence
  Synthetic polynucleotide
gataagaagtactcaatcggtctggcaatcggaaccaactctgtgggttgggcagtgattacagatgagtataaggtgccaagcaaaaaattcaaggtgctgggtaataccgacagacacagcattaagaagaatttgattggagcactcctctttgactcaggggaaacagcagaggcaacaaggctgaagaggacagcaaggcggaggtacacaaggcggaaaaacaggatatgctacctccaggaaatctttagcaacgagatggctaaagtggatgatagctttttccatagactcgaagaatcctttcttgttgaagaggacaaaaagcatgaaaggcatcccatcttcggcaatatagttgatgaggttgcataccatgagaagtaccccacaatctaccacctcagaaagaaacttgtggactccacagataaagcagacctgaggctcatatacctcgcactcgcacacatgatcaagttcagagggcactttctcatcgaaggtgacctgaatccagataattcagatgtggataaactgtttatacagctggtgcaaacatacaaccaacttttcgaggaaaacccaatcaatgcctccggtgttgatgcaaaggccatcctgtcagcaagactcagcaaaagcaggcggctcgaaaacctcatcgcccagcttcccggtgaaaagaagaacgggctctttggtaatctcatcgcattgagccttggtcttactccaaacttcaagagcaattttgatctggcagaggatgctaaactgcaactctcaaaggacacatatgacgatgaccttgacaatctgttggcccagatcggggaccaatatgcagacctcttcctggccgcaaagaatctgtcagatgcaatcctcttgtccgacatactgagagttaacactgagatcacaaaggcacctctgtccgcctccatgattaagagatacgatgagcatcaccaggatctgactttgctcaaagccctcgttagacagcagttgccagaaaagtacaaagaaatattctttgatcaatcaaaaaacggatatgcagggtacatcgacggtggggcaagccaggaagagttctacaaattcatcaaacctatcctggaaaagatggatgggacagaagagctgctggttaagctgaatagggaagacctcctcagaaagcagaggacatttgataacgggagcatccctcatcaaatccacctcggtgaactccatgctatcctgagaaggcaggaagacttttatccatttttgaaggacaatagggagaaaatcgaaaaaatcctgacattcagaatcccatactacgttggtcctctggcaagaggtaacagtaggttcgcatggatgacaaggaaaagcgaggagacaatcacaccctggaattttgaggaagttgttgacaagggtgccagcgcacaatcctttatcgaaagaatgacaaatttcgacaagaatctgcctaacgaaaaggttctcccaaagcattcactcctgtacgaatattttacagtttataacgaactgactaaagttaaatacgttaccgagggtatgaggaagccagcattcctttccggggaacagaagaaagctattgtggacctcctgttcaagacaaatagaaaagtgacagttaagcaactcaaagaggattacttcaaaaagatcgaatgttttgactctgtggagatcagcggggtggaggatagattcaacgccagcctgggtacatatcatgatctcctgaaaatcattaaagacaaggacttccttgacaacgaggagaacgaggacattctggaagacattgttctgaccctcacactctttgaggatagggagatgattgaggaaagactgaagacctacgcccacctctttgacgataaagtgatgaaacagctcaagagaagaaggtatacaggttgggggagactgagcaggaagttgatcaatgggattagggacaaacagtccgggaaaacaatcctcgattttctgaagtcagacggtttcgcaaacagaaattttatgcagctcattcacgatgacagcttgacattcaaggaagacatccaaaaggctcaagtgagcggccaaggggatagcctccacgagcatattgcaaatctggcaggttcaccagccatcaaaaagggcatacttcagacagttaaggttgtggacgaattggttaaagttatgggcaggcataagccagagaatatcgttatcgaaatggcaagggagaaccaaacaactcaaaaagggcagaaaaatagcagagagaggatgaaaagaatcgaggaagggatcaaggaacttgggtcccaaatcctcaaggagcacccagttgaaaatactcaactgcaaaacgagaagctctatctctactatctccaaaacgggagggatatgtatgttgaccaggagctggatattaacagactgtcagattatgatgttgatcatatcgtgccccagtcattcctgaaggacgattccatcgacaacaaagttctcacaaggtccgataaaaacaggggcaagtccgataacgttccaagcgaagaagtggtgaaaaagatgaaaaactattggagacaacttctgaatgcaaagttgattactcagagaaagtttgacaacctcacaaaagcagaaagaggcgggcttagcgaactcgataaggcagggtttatcaaaagacagctggttgagacaaggcagatcacaaaacatgtggcacagatccttgactcaaggatgaataccaagtatgatgagaatgataagttgatcagggaggttaaagttatcacactcaaatccaaactggtgtcagacttcaggaaagactttcaattttataaggtgagggagatcaataactaccaccatgcacatgacgcctacctgaacgcagtggtgggtacagcattgattaaaaaataccctaagctggagtctgagtttgtgtacggggactacaaggtgtacgacgtgaggaaaatgatagccaagtccgagcaggagatcgggaaagcaacagctaagtatttcttttacagtaatatcatgaatttctttaaaactgagattactctggcaaacggggagatcaggaaaagacccctcatcgagactaatggtgaaacaggtgagatcgtttgggacaaggggagggattttgctactgttagaaaagttctgagtatgccacaagtgaatattgtgaaaaagacagaagttcagacaggtgggttctccaaagaatccatcctgcccaagagaaattcagacaagctcatcgcaagaaagaaggactgggaccctaagaagtacggaggatttgacagccccaccgtggcctattccgtgcttgttgtggcaaaggtggagaaagggaagagcaaaaaactgaaatccgtgaaagaactgctgggaattaccatcatggaaagaagctcctttgagaagaacccaatcgacttcctggaagcaaaaggatataaggaagtgaaaaaggacctcattatcaagctcccaaaatactcacttttcgagttggagaacggtagaaagaggatgctggcaagcgcaggggaacttcagaaaggcaatgagctggcattgccatcaaagtatgtgaacttcctctacttggccagccattacgagaaacttaaaggtagcccagaagataacgagcaaaaacagctctttgtggaacagcataagcattatctggatgagatcatagaacaaatctcagagttttccaagagagttatcctcgcagatgcaaacctggataaggttctctcagcctataataagcatagagacaagccaattagagagcaagcagagaacattatccacttgttcactcttacaaacctgggggcaccagccgccttcaaatatttcgatacaacaatagacagaaagaggtataccagcaccaaagaagttctcgacgccacactgatccatcaatcaatcacaggcctttacgaaactaggatcgacttgtcacaactgggtggggat

SEQ ID NO: 11 - DNA, 3307 bp, Artificial sequence
  Synthetic polynucleotide
gagcaaggacacctacgacgacgacttggacaacctattggcccagataggtgaccagtatgcagacctcttccttgcggccaagaacttgagtgacgctatactgctcagtgacatcctgagggtgaacactgagatcactaaggcccctctctctgcctcaatgattaagcgttacgacgagcatcaccaggatctcaccctgcttaaggcccttgttcggcagcagctccctgagaagtacaaggagatattttttgaccagtctaagaacggctacgccggttacattgacggtggggcaagccaggaggagttctacaagttcatcaagccgatccttgagaagatggacggcaccgaggagctacttgtcaagttgaaccgggaagacctgctccggaaacagcgtacattcgacaacggcagcatccctcaccagatccacctgggcgaactacacgccatcctccgacgtcaggaggacttctatccattcttgaaagataacagggaaaaaatcgaaaaaatacttacgtttcgaataccttactacgtggggccccttgctcggggaaactccagattcgcatggatgaccaggaagtcagaggagaccatcacaccctggaactttgaggaggtggttgacaaaggtgcttctgcccagtccttcattgagcggatgactaacttcgacaagaacctgcccaacgagaaggtgctgccaaagcacagcctgctctacgaatactttactgtgtacaatgagctgacgaaggtgaagtacgtgacagaggggatgcggaagcccgctttcctgagcggcgagcaaaaaaaagcaatcgtggacctactgttcaagaccaaccgaaaggtgacagtgaagcagctcaaggaggactacttcaaaaaaatcgagtgcttcgactctgttgagataagcggcgtggaggaccgattcaacgcctcattgggaacctatcacgacctgctcaagatcattaaggacaaggacttcctggataatgaggagaatgaggacatcctggaggatattgtgctgacccttactctattcgaggacagggagatgatcgaggagcgactcaagacctacgctcacctgttcgacgacaaggttatgaagcaattgaagcgtaggcgatacacggggtggggaagactctcccgaaaactgataaacggcatcagggacaagcagtcagggaagacgatcttggacttcctgaaatccgacgggttcgccaaccgcaacttcatgcagctcattcacgacgactcactaacgttcaaagaggacattcagaaggctcaagtcagtggacaaggcgactccctgcacgagcacattgcaaaccttgcgggctccccggcgattaaaaagggcattctccaaacggttaaggtggtggacgagctggtgaaggtgatgggccgacacaagcctgagaacatcgtgatcgagatggccagggagaaccagactacccagaagggtcagaagaactctcgggaacgtatgaagcgtattgaggaggggattaaggagttgggctctcaaatcctcaaggagcaccctgtggagaacactcagctccaaaacgagaagctgtacctgtactacctgcaaaacgggcgcgatatgtacgtggatcaggagttggacatcaacaggcttagcgattacgacgtggaccacatcgtgccacagtcattcttaaaggacgacagcatcgacaacaaggttctgacgaggagcgacaagaatcgagggaaaagtgacaatgttccatccgaggaggtggtcaagaaaatgaagaactattggcgtcagcttctgaacgccaagctcatcacccagcggaaattcgacaacctgactaaggctgagcgaggcggactctccgagcttgacaaggctggcttcatcaagcggcagttggtcgaaacccgacagataacgaagcacgttgcccagatacttgactcccgtatgaacaccaagtacgacgagaacgacaagctcatcagggaggtgaaggtcattacccttaagtccaaactcgtcagcgactttcgtaaggacttccagttctacaaggtgcgcgagatcaataactaccaccacgcacacgacgcctacctgaacgcagtggttggaaccgcgttgattaaaaagtaccccaagttggagtcggagttcgtttacggggactacaaggtgtacgacgttcggaagatgatcgccaagtctgaacaggagatcgggaaagcaaccgccaagtatttcttctatagcaacatcatgaacttctttaaaaccgagatcacacttgccaatggcgagatccgtaagaggccgctgatcgagacaaatggggagactggcgagatcgtgtgggacaagggccgcgacttcgcaaccgttcggaaagtcttgtccatgcctcaagtcaacatcgtcaagaagactgaggtgcaaacaggcgggttctcgaaggagtccatactgcccaagaggaactcagacaagctcatagcacgcaaaaaagactgggatccaaagaaatacggcgggttcgactcgccgacagtcgcatactccgtgttagtggtggctaaagtggaaaaggggaagtccaagaagctcaagtccgtcaaggagttgctcgggatcaccattatggaacggtcctcattcgagaagaatcccattgacttcctagaggcgaagggctacaaagaggtcaaaaaggacctaattattaagctccccaagtattcactcttcgaacttgaaaatggtcgtaagcggatgttggcaagcgctggagagcttcagaaggggaacgagcttgcactgccttccaagtacgtgaacttcctgtacctcgcctctcattacgagaagttgaagggctcaccggaggacaacgagcagaagcagttgttcgtggagcagcacaagcactacctcgacgagatcattgagcagataagtgagttcagcaaacgggtgatccttgccgacgctaacctggacaaggtgctgagcgcctacaacaagcacagagacaagccgatccgagagcaagcggagaacatcatacacctgttcaccctcacgaacctcggggctcccgcagccttcaaatattttgacacgaccatcgaccgtaaacgctacactagcacgaaggaggtgctggacgctacccttatccaccagtccatcaccggcctgtacgagacgagaatcgacttgtcgcagctcggtggtgac

SEQ ID NO: 12 - DNA, 4101 bp, Artificial sequence
  Synthetic polynucleotide
gacaaaaaatactcaattggtctggcaattgggaccaacagtgtcggatgggccgtgattaccgacgagtacaaggtgccgtccaaaaaattcaaggtgcttgggaacaccgaccgccactcgatcaagaaaaacctaatcggtgcgttgcttttcgacagtggggagaccgccgaggcaacacgcttaaaacgcacagctaggaggagatatacacggcgcaagaaccgaatatgctacttacaggagatattctccaatgagatggcgaaggtggacgactctttcttccatcggcttgaggaatccttcctggtcgaggaggacaagaagcacgagcgacacccgatattcgggaacatcgttgatgaggtggcgtaccacgagaagtacccaacgatataccacttacgcaagaagctcgtggactctacggacaaggccgacttgcgccttatctacttggcactggcccacatgattaagttccgaggccacttccttatcgagggtgacctgaaccccgataactccgacgtggacaagctcttcatccaactcgtccagacatacaaccagctattcgaggagaatcctatcaacgcctctggggtggacgctaaagctatcctctcagcccgcctgtcaaagtcgaggaggttggagaacctaatcgcccagcttccaggcgagaagaaaaatgggctgttcggaaaccttatcgcactctcactgggcctaaccccgaacttcaagtccaacttcgacctggcagaggacgcgaaattgcagttgtcgaaagacacctatgacgatgacctggacaacctgttggcccagataggggaccagtacgccgacctgttcctagcggccaagaacctgtccgacgccatcttgctgtcggatatactgcgggtgaacaccgagatcactaaagcacctctctccgccagcatgattaagcgttacgacgagcaccaccaagatttgaccctgctaaaggcacttgtacggcagcagcttcccgagaagtacaaggagatctttttcgaccaaagcaagaacggctacgccgggtacatcgacggaggtgccagccaggaggagttctacaagttcattaagcccatcctggagaagatggacgggactgaggaactacttgtgaagctgaaccgggaagacttactacggaagcagcgtaccttcgacaacggttctatcccacatcagatccatcttggggagttgcacgcgatcctgcgacgccaggaggacttttaccccttcctgaaagacaaccgcgagaaaatcgagaagatactgaccttcagaataccttactacgtcggaccccttgcgcgaggcaactcaagattcgcgtggatgaccaggaaatcagaggagaccatcacaccctggaatttcgaggaggtggttgacaagggtgcctccgcccagtcctttatcgaacgaatgaccaacttcgacaagaacttgcccaacgagaaggtgctccccaaacacagcctcctctacgaatatttcacagtgtacaacgagcttactaaagttaagtatgttactgagggcatgaggaaacccgccttcctgtcaggcgagcagaagaaagctattgtggacctccttttcaagaccaaccggaaggtgacagtgaagcagctcaaggaggactacttcaagaagatagagtgcttcgacagcgtggagatcagcggggtggaggacagattcaatgcctctctcggaacataccacgacttgcttaagatcatcaaggacaaggacttcctcgacaacgaggaaaacgaggatattctggaggatattgttctgactcttaccctgttcgaggaccgggagatgatcgaggagcgtctcaagacctacgcccacctgttcgacgacaaagttatgaagcagctcaagcgtcggagatataccggatggggccgtctgtctcggaagctcatcaacgggatcagggacaagcagtcagggaagacgatcttagacttccttaagtctgacggcttcgccaacaggaacttcatgcagttgatccacgacgacagccttaccttcaaggaggacatccagaaggcccaagtgagtggccagggtgacagcctccacgagcatattgctaatcttgcgggttccccagcgattaaaaagggcatacttcaaaccgttaaggtggtggacgagcttgtcaaggtgatggggcgacacaagcccgagaacatcgtgatcgagatggccagggagaaccagaccacccagaaggggcagaagaatagccgagaacgcatgaagcgcatcgaggaggggattaaggagctagggagccagatcctcaaggaacatcccgtcgagaacacccagctccagaacgagaagctatacctctactacttgcaaaacgggagggatatgtacgtggatcaggagttggacattaaccgcctaagcgactacgacgtagatcacatcgtgcctcagtcattcctcaaagacgacagcattgacaacaaagtcttgacccgatccgacaagaaccgaggaaaatccgacaatgtgccctcagaggaggtcgtcaagaaaatgaagaactattggaggcagctacttaacgccaaactcataacccagcggaagttcgacaacctgacaaaggctgagcggggtgggctcagcgagcttgacaaggctggcttcatcaagcggcagttggtggagacaagacagataacgaagcacgtggctcagatcctggactctcgcatgaacacgaagtacgacgagaacgacaaattgatccgcgaggtcaaggttattacgctcaagagcaaacttgtcagcgatttccgcaaggacttccagttctacaaggtgagggagattaacaactaccaccatgcacatgatgcctacttgaacgcagtggtggggaccgcgcttattaaaaagtaccctaagttggagtcagagttcgtttatggggactacaaggtgtacgacgtccggaagatgattgcaaagtctgaacaggaaatcgggaaggccaccgccaaatatttcttctacagtaacattatgaatttttttaagactgaaattactctcgcaaacggcgagatcaggaagcgtcccctcatcgagacaaacggggagaccggggagatagtctgggacaaggggcgggacttcgctacggtgaggaaggtgctctcgatgccacaagtgaacatcgtcaaaaagacagaggtgcagaccggtggcttctcaaaggagtcaatcctgccaaaacgtaacagcgacaagctcatcgcccgcaagaaagactgggaccctaagaagtatggtgggttcgactcaccgacggtcgcatactccgttctggtcgtggcaaaggtggaaaagggcaagtccaaaaaactgaaatccgtgaaggagttgcttggcattaccatcatggaacgcagcagcttcgagaagaaccccattgacttcctggaggctaaagggtacaaggaggtcaagaaagatttaattattaagctacctaagtacagcttgttcgagctggagaacggccgaaaacgaatgctcgcatccgccggggaacttcaaaagggcaacgagcttgcgctgccctccaagtacgtgaacttcctgtacttggcatcccactacgagaaactcaagggtagcccagaggacaacgagcagaagcagctattcgtggagcagcacaagcactacctcgacgagataatcgagcagatcagtgagttcagtaagcgggtgatactcgcggacgccaacttggacaaggtgcttagtgcctacaacaagcaccgtgacaagcccatccgagaacaggctgagaacatcatccaccttttcactctgacaaacctcggtgctcccgccgccttcaaatacttcgacactaccatcgacaggaagcgctacacatctacgaaggaagttcttgacgctacgcttattcatcagtctatcacagggctgtacgagacaaggatcgaccttagccaactcggcggggat

SEQ ID NO: 13 - DNA, 4101 bp, Artificial sequence
  Synthetic polynucleotide
gacaagaagtacagcatcgggctggcgatcgggaccaactccgtcggctgggctgtgattaccgacgagtacaaggtgccatccaagaagttcaaggtcctcggcaacactgaccggcacagcattaagaagaacctgattggggcgctgctgttcgattcgggggagactgcggaggcgaccaggctgaagcggactgcgcgccggaggtacaccaggaggaagaatcggatctgctacctccaggagattttctcgaatgagatggccaaggtggacgattccttcttccatcgcctggaggagtcgttcctcgttgaggaggacaagaagcatgagaggcatcccattttcgggaatatcgttgacgaggtggcttaccatgagaagtacccgaccatctaccatctgcggaagaagctcgtcgattcgaccgataaggccgacctgcggctgatctacctggccctcgcgcacatgattaagttccggggccatttcctcatcgagggcgacctcaacccggacaactcggacgtggataagctcttcattcagctcgtgcagacatacaaccagctcttcgaggagaatcccattaacgcctcgggggtcgacgctaaggctattctctcggctcggctgtcgaagtcgcgccggctggagaatctcattgcccagctcccaggcgagaagaagaacggcctcttcggcaacctgattgccctgtcgctggggctcacaccgaatttcaagtcgaacttcgacctcgccgaggacgctaagctccagctcagcaaggatacttacgatgatgacctcgataacctgctcgcccagattggggatcagtacgcggatctgttcctcgcggccaagaatctcagcgatgctattctcctgtcggacattctccgcgtcaacacagagattactaaggccccactgtcggcgagcatgattaagaggtacgatgagcatcatcaggacctgacactgctcaaggcgctggtccggcagcagctccccgagaagtacaaggagattttcttcgatcagtcaaagaatgggtacgcgggctacattgatggcggcgcgtcccaggaggagttctacaagttcattaagcccatcctggagaagatggacgggaccgaggagctgctggtgaagctcaatcgggaggacctgctccggaagcagcgcacattcgacaatggctcgattcctcaccagattcacctgggcgagctgcacgccattctccgcaggcaggaggacttctacccgttcctcaaggacaaccgcgagaagatcgagaagatcctgaccttccggattccatactacgtggggccgctcgcgcgggggaactcccggttcgcgtggatgactcgcaagtccgaagaaacgattacaccgtggaatttcgaggaggtcgtcgacaagggcgctagtgcgcagtcattcattgagaggatgaccaatttcgataagaacctgcctaacgagaaggtgctgccgaagcattcgctgctctacgagtacttcaccgtttacaatgagctgaccaaggtgaagtatgtgactgagggcatgaggaagccagcgttcctgagcggcgagcagaagaaggctatcgtggacctgctcttcaagactaaccggaaggtgactgtgaagcagctcaaggaggactacttcaagaagattgagtgcttcgattccgttgagattagcggggtggaggatcggttcaatgcttcgctcgggacataccacgatctcctgaagatcattaaggataaggacttcctcgacaacgaggagaacgaggacattctcgaagatattgtcctgaccctcaccctcttcgaggatcgggagatgatcgaggagaggctcaagacatacgctcatctgttcgatgataaggtcatgaagcagctgaagcgcaggcggtacacagggtgggggcggctgagccggaagctgatcaacgggattcgggataagcagtccgggaagacaattctcgacttcctcaagtccgacgggttcgctaaccggaacttcatgcagctcattcatgatgactcgctgacattcaaggaggatattcagaaggcgcaggtttcggggcagggcgactcgctccacgagcatattgcgaatctggcgggctcccccgcgattaagaagggcattctgcaaaccgtcaaggtggttgatgagctggtcaaggtcatggggcggcataagccagagaatattgtcatcgagatggcgcgggagaatcagaccacacagaaggggcagaagaactcacgggagcggatgaagcgcatcgaggagggcatcaaggagctggggtcgcagatcctgaaggagcatcccgtggagaacactcagctgcaaaatgagaagctgtacctctactacctccagaacgggagggacatgtatgtggatcaggagctggatattaataggctgagcgattacgatgtcgaccacattgtcccacagtcgttcctgaaggacgacagcattgacaacaaggtgctgacccgctcggataagaacaggggcaagagcgataatgttccaagcgaggaggttgtgaagaagatgaagaactactggcggcagctcctgaacgcgaagctcatcacacagcggaagttcgacaacctcaccaaggctgagcgcgggggcctgagcgagctggacaaggcggggttcattaagaggcagctggtcgagacacggcagattacaaagcatgttgcgcagattctcgattcccggatgaacaccaagtacgatgagaacgataagctgattcgggaggtcaaggtaattaccctgaagtccaagctggtgtccgacttcaggaaggacttccagttctacaaggttcgggagatcaacaactaccaccacgcgcatgatgcctacctcaacgcggtcgtggggaccgctctcatcaagaagtacccaaagctggagtcagagttcgtctacggggattacaaggtttacgacgtgcggaagatgatcgctaagagcgagcaggagattggcaaggctaccgctaagtacttcttctactccaacatcatgaacttcttcaagacagagattaccctcgcgaatggcgagatccggaagaggcccctcatcgagacaaatggggagacaggggagattgtctgggataaggggcgggatttcgcgaccgtccggaaggtcctgtcgatgccccaggttaatattgtcaagaagactgaggtccagactggcggcttctcaaaggagtcgattctcccaaagaggaactccgataagctcattgctcggaagaaggattgggaccccaagaagtacgggggattcgactcccccactgttgcttactctgttctggttgttgctaaggtggagaaggggaagtcgaagaagctgaagagcgtgaaggagctgctcgggattacaattatggagaggtcatccttcgagaagaatcccatcgacttcctggaggccaagggctacaaggaggtgaagaaggacctgattattaagctgcccaagtactcgctcttcgagctggagaatgggcggaagcggatgctggcgtccgcgggggagctgcaaaaggggaacgagctggcgctcccctccaagtatgtgaacttcctctacctggcgtcgcactacgagaagctgaaggggtccccagaggataatgagcagaagcagctcttcgtcgagcagcataagcactacctggacgagattatcgagcagattagcgagttctcgaagcgggtcatcctcgcggatgcgaacctggataaggtgctcagcgcctacaataagcaccgggacaagccgattcgggagcaggcggagaatattattcacctcttcacactcaccaacctcggggcaccagctgcgttcaagtacttcgacactactatcgaccggaagcggtacacctcgacgaaggaggtgctcgacgccaccctcattcaccagtcgatcacaggcctgtacgagacacggattgacctgtcccagctcgggggcgac

SEQ ID NO: 14 - protein, 1367 aa, Artificial sequence
  Synthetic polypeptide
DKKYSIGLAIGTNSVGWAVITDEYKVPSKKFKVLGNTDRHSIKKNLIGALLFDSGETAEATRLKRTARRRYTRRKNRICYLQEIFSNEMAKVDDSFFHRLEESFLVEEDKKHERHPIFGNIVDEVAYHEKYPTIYHLRKKLVDSTDKADLRLIYLALAHMIKFRGHFLIEGDLNPDNSDVDKLFIQLVQTYNQLFEENPINASGVDAKAILSARLSKSRRLENLIAQLPGEKKNGLFGNLIALSLGLTPNFKSNFDLAEDAKLQLSKDTYDDDLDNLLAQIGDQYADLFLAAKNLSDAILLSDILRVNTEITKAPLSASMIKRYDEHHQDLTLLKALVRQQLPEKYKEIFFDQSKNGYAGYIDGGASQEEFYKFIKPILEKMDGTEELLVKLNREDLLRKQRTFDNGSIPHQIHLGELHAILRRQEDFYPFLKDNREKIEKILTFRIPYYVGPLARGNSRFAWMTRKSEETITPWNFEEVVDKGASAQSFIERMTNFDKNLPNEKVLPKHSLLYEYFTVYNELTKVKYVTEGMRKPAFLSGEQKKAIVDLLFKTNRKVTVKQLKEDYFKKIECFDSVEISGVEDRFNASLGTYHDLLKIIKDKDFLDNEENEDILEDIVLTLTLFEDREMIEERLKTYAHLFDDKVMKQLKRRRYTGWGRLSRKLINGIRDKQSGKTILDFLKSDGFANRNFMQLIHDDSLTFKEDIQKAQVSGQGDSLHEHIANLAGSPAIKKGILQTVKVVDELVKVMGRHKPENIVIEMARENQTTQKGQKNSRERMKRIEEGIKELGSQILKEHPVENTQLQNEKLYLYYLQNGRDMYVDQELDINRLSDYDVDHIVPQSFLKDDSIDNKVLTRSDKNRGKSDNVPSEEVVKKMKNYWRQLLNAKLITQRKFDNLTKAERGGLSELDKAGFIKRQLVETRQITKHVAQILDSRMNTKYDENDKLIREVKVITLKSKLVSDFRKDFQFYKVREINNYHHAHDAYLNAVVGTALIKKYPKLESEFVYGDYKVYDVRKMIAKSEQEIGKATAKYFFYSNIMNFFKTEITLANGEIRKRPLIETNGETGEIVWDKGRDFATVRKVLSMPQVNIVKKTEVQTGGFSKESILPKRNSDKLIARKKDWDPKKYGGFDSPTVAYSVLVVAKVEKGKSKKLKSVKELLGITIMERSSFEKNPIDFLEAKGYKEVKKDLIIKLPKYSLFELENGRKRMLASAGELQKGNELALPSKYVNFLYLASHYEKLKGSPEDNEQKQLFVEQHKHYLDEIIEQISEFSKRVILADANLDKVLSAYNKHRDKPIREQAENIIHLFTLTNLGAPAAFKYFDTTIDRKRYTSTKEVLDATLIHQSITGLYETRIDLSQLGGD

SEQ ID NO: 15 - protein, 1367 aa, Artificial sequence
  Synthetic polypeptide
DKKYSIGLAIGTNSVGWAVITDEYKVPSKKFKVLGNTDRHSIKKNLIGALLFDSGETAEATRLKRTARRRYTRRKNRICYLQEIFSNEMAKVDDSFFHRLEESFLVEEDKKHERHPIFGNIVDEVAYHEKYPTIYHLRKKLVDSTDKADLRLIYLALAHMIKFRGHFLIEGDLNPDNSDVDKLFIQLVQTYNQLFEENPINASGVDAKAILSARLSKSRRLENLIAQLPGEKKNGLFGNLIALSLGLTPNFKSNFDLAEDAKLQLSKDTYDDDLDNLLAQIGDQYADLFLAAKNLSDAILLSDILRVNTEITKAPLSASMIKRYDEHHQDLTLLKALVRQQLPEKYKEIFFDQSKNGYAGYIDGGASQEEFYKFIKPILEKMDGTEELLVKLNREDLLRKQRTFDNGSIPHQIHLGELHAILRRQEDFYPFLKDNREKIEKILTFRIPYYVGPLARGNSRFAWMTRKSEETITPWNFEEVVDKGASAQSFIERMTNFDKNLPNEKVLPKHSLLYEYFTVYNELTKVKYVTEGMRKPAFLSGEQKKAIVDLLFKTNRKVTVKQLKEDYFKKIECFDSVEISGVEDRFNASLGTYHDLLKIIKDKDFLDNEENEDILEDIVLTLTLFEDREMIEERLKTYAHLFDDKVMKQLKRRRYTGWGRLSRKLINGIRDKQSGKTILDFLKSDGFANRNFMQLIHDDSLTFKEDIQKAQVSGQGDSLHEHIANLAGSPAIKKGILQTVKVVDELVKVMGRHKPENIVIEMARENQTTQKGQKNSRERMKRIEEGIKELGSQILKEHPVENTQLQNEKLYLYYLQNGRDMYVDQELDINRLSDYDVDHIVPQSFLADDSIDNKVLTRSDKNRGKSDNVPSEEVVKKMKNYWRQLLNAKLITQRKFDNLTKAERGGLSELDKAGFIKRQLVETRQITKHVAQILDSRMNTKYDENDKLIREVKVITLKSKLVSDFRKDFQFYKVREINNYHHAHDAYLNAVVGTALIKKYPALESEFVYGDYKVYDVRKMIAKSEQEIGKATAKYFFYSNIMNFFKTEITLANGEIRKAPLIETNGETGEIVWDKGRDFATVRKVLSMPQVNIVKKTEVQTGGFSKESILPKRNSDKLIARKKDWDPKKYGGFDSPTVAYSVLVVAKVEKGKSKKLKSVKELLGITIMERSSFEKNPIDFLEAKGYKEVKKDLIIKLPKYSLFELENGRKRMLASAGELQKGNELALPSKYVNFLYLASHYEKLKGSPEDNEQKQLFVEQHKHYLDEIIEQISEFSKRVILADANLDKVLSAYNKHRDKPIREQAENIIHLFTLTNLGAPAAFKYFDTTIDRKRYTSTKEVLDATLIHQSITGLYETRIDLSQLGGD

SEQ ID NO: 16 - protein, 1228 aa, Unknown
  Lachnospiraceae bacterium
MSKLEKFTNCYSLSKTLRFKAIPVGKTQENIDNKRLLVEDEKRAEDYKGVKKLLDRYYLSFINDVLHSIKLKNLNNYISLFRKKTRTEKENKELENLEINLRKEIAKAFKGNEGYKSLFKKDIIETILPEFLDDKDEIALVNSFNGFTTAFTGFFDNRENMFSEEAKSTSIAFRCINENLTRYISNMDIFEKVDAIFDKHEVQEIKEKILNSDYDVEDFFEGEFFNFVLTQEGIDVYNAIIGGFVTESGEKIKGLNEYINLYNQKTKQKLPKFKPLYKQVLSDRESLSFYGEGYTSDEEVLEVFRNTLNKNSEIFSSIKKLEKLFKNFDEYSSAGIFVKNGPAISTISKDIFGEWNVIRDKWNAEYDDIHLKKKAVVTEKYEDDRRKSFKKIGSFSLEQLQEYADADLSVVEKLKEIIIQKVDEIYKVYGSSEKLFDADFVLEKSLKKNDAVVAIMKDLLDSVKSFENYIKAFFGEGKETNRDESFYGDFVLAYDILLKVDHIYDAIRNYVTQKPYSKDKFKLYFQNPQFMGGWDKDKETDYRATILRYGSKYYLAIMDKKYAKCLQKIDKDDVNGNYEKINYKLLPGPNKMLPKVFFSKKWMAYYNPSEDIQKIYKNGTFKKGDMFNLNDCHKLIDFFKDSISRYPKWSNAYDFNFSETEKYKDIAGFYREVEEQGYKVSFESASKKEVDKLVEEGKLYMFQIYNKDFSDKSHGTPNLHTMYFKLLFDENNHGQIRLSGGAELFMRRASLKKEELVVHPANSPIANKNPDNPKKTTTLSYDVYKDKRFSEDQYELHIPIAINKCPKNIFKINTEVRVLLKHDDNPYVIGIARGERNLLYIVVVDGKGNIVEQYSLNEIINNFNGIRIKTDYHSLLDKKEKERFEARQNWTSIENIKELKAGYISQVVHKICELVEKYDAVIALEDLNSGFKNSRVKVEKQVYQKFEKMLIDKLNYMVDKKSNPCATGGALKGYQITNKFESFKSMSTQNGFIFYIPAWLTSKIDPSTGFVNLLKTKYTSIADSKKFISSFDRIMYVPEEDLFEFALDYKNFSRTDADYIKKWKLYSYGNRIRIFRNPKKNNVFDWEEVCLTSAYKELFNKYGINYQQGDIRALLCEQSDKAFYSSFMALMSLMLQMRNSITGRTDVDFLISPVKNSDGIFYDSRNYEAQENAILPKNADANGAYNIARKVLWAIGQFKKAEDEKLDKVKIAISNKEWLEYAQTSVKH

SEQ ID NO: 17 - protein, 1307 aa, Acidaminococcus sp.
MTQFEGFTNLYQVSKTLRFELIPQGKTLKHIQEQGFIEEDKARNDHYKELKPIIDRIYKTYADQCLQLVQLDWENLSAAIDSYRKEKTEETRNALIEEQATYRNAIHDYFIGRTDNLTDAINKRHAEIYKGLFKAELFNGKVLKQLGTVTTTEHENALLRSFDKFTTYFSGFYENRKNVFSAEDISTAIPHRIVQDNFPKFKENCHIFTRLITAVPSLREHFENVKKAIGIFVSTSIEEVFSFPFYNQLLTQTQIDLYNQLLGGISREAGTEKIKGLNEVLNLAIQKNDETAHIIASLPHRFIPLFKQILSDRNTLSFILEEFKSDEEVIQSFCKYKTLLRNENVLETAEALFNELNSIDLTHIFISHKKLETISSALCDHWDTLRNALYERRISELTGKITKSAKEKVQRSLKHEDINLQEIISAAGKELSEAFKQKTSEILSHAHAALDQPLPTTLKKQEEKEILKSQLDSLLGLYHLLDWFAVDESNEVDPEFSARLTGIKLEMEPSLSFYNKARNYATKKPYSVEKFKLNFQMPTLASGWDVNKEKNNGAILFVKNGLYYLGIMPKQKGRYKALSFEPTEKTSEGFDKMYYDYFPDAAKMIPKCSTQLKAVTAHFQTHTTPILLSNNFIEPLEITKEIYDLNNPEKEPKKFQTAYAKKTGDQKGYREALCKWIDFTRDFLSKYTKTTSIDLSSLRPSSQYKDLGEYYAELNPLLYHISFQRIAEKEIMDAVETGKLYLFQIYNKDFAKGHHGKPNLHTLYWTGLFSPENLAKTSIKLNGQAELFYRPKSRMKRMAHRLGEKMLNKKLKDQKTPIPDTLYQELYDYVNHRLSHDLSDEARALLPNVITKEVSHEIIKDRRFTSDKFFFHVPITLNYQAANSPSKFNQRVNAYLKEHPETPIIGIDRGERNLIYITVIDSTGKILEQRSLNTIQQFDYQKKLDNREKERVAARQAWSVVGTIKDLKQGYLSQVIHEIVDLMIHYQAVVVLENLNFGFKSKRTGIAEKAVYQQFEKMLIDKLNCLVLKDYPAEKVGGVLNPYQLTDQFTSFAKMGTQSGFLFYVPAPYTSKIDPLTGFVDPFVWKTIKNHESRKHFLEGFDFLHYDVKTGDFILHFKMNRNLSFQRGLPGFMPAWDIVFEKNETQFDAKGTPFIAGKRIVPVIENHRFTGRYRDLYPANELIALLEEKGIVFRDGSNILPKLLENDDSHAIDTMVALIRSVLQMRNSNAATGEDYINSPVRDLNGVCFDSRFQNPEWPMDADANGAYHIALKGQLLLNHLKESKDLKLQNGISNQDWLAYIQELRN

SEQ ID NO: 18 - protein, 1241 aa, Butyrivibrio proteoclasticus
MLLYENYTKRNQITKSLRLELRPQGKTLRNIKELNLLEQDKAIYALLERLKPVIDEGIKDIARDTLKNCELSFEKLYEHFLSGDKKAYAKESERLKKEIVKTLIKNLPEGIGKISEINSAKYLNGVLYDFIDKTHKDSEEKQNILSDILETKGYLALFSKFLTSRITTLEQSMPKRVIENFEIYAANIPKMQDALERGAVSFAIEYESICSVDYYNQILSQEDIDSYNRLISGIMDEDGAKEKGINQTISEKNIKIKSEHLEEKPFRILKQLHKQILEEREKAFTIDHIDSDEEVVQVTKEAFEQTKEQWENIKKINGFYAKDPGDITLFIVVGPNQTHVLSQLIYGEHDRIRLLLEEYEKNTLEVLPRRTKSEDARYDKFVNAVPKKVAKESHTFDGLQKMTGDDRLFILYRDELARNYMRIKEAYGTFERDILKSRRGIKGNRDVQESLVSFYDELTKFRSALRIINSGNDEKADPIFYNTFDGIFEKANRTYKAENLCRNYVTKSPADDARIMASCLGTPARLRTHWWNGEENFAINDVAMIRRGDEYYYFVLTPDVKPVDLKTKDETDAQIFVQRKGAKSFLGLPKALFKCILEPYFESPEHKNDKNCVIEEYVSKPLTIDRRAYDIFKNGTFKKTNIGIDGLTEEKFKDDCRYLIDVYKEFIAVYTRYSCFNMSGLKRADEYNDIGEFFSDVDTRLCTMEWIPVSFERINDMVDKKEGLLFLVRSMFLYNRPRKPYERTFIQLFSDSNMEHTSMLLNSRAMIQYRAASLPRRVTHKKGSILVALRDSNGEHIPMHIREAIYKMKNNFDISSEDFIMAKAYLAEHDVAIKKANEDIIRNRRYTEDKFFLSLSYTKNADISARTLDYINDKVEEDTQDSRMAVIVTRNLKDLTYVAVVDEKNNVLEEKSLNEIDGVNYRELLKERTKIKYHDKTRLWQYDVSSKGLKEAYVELAVTQISKLATKYNAVVVVESMSSTFKDKFSFLDEQIFKAFEARLCARMSDLSFNTIKEGEAGSISNPIQVSNNNGNSYQDGVIYFLNNAYTRTLCPDTGFVDVFDKTRLITMQSKRQFFAKMKDIRIDDGEMLFTFNLEEYPTKRLLDRKEWTVKIAGDGSYFDKDKGEYVYVNDIVREQIIPALLEDKAVFDGNMAEKFLDKTAISGKSVELIYKWFANALYGIITKKDGEKIYRSPITGTEIDVSKNTTYNFGKKFMFKQEYRGDGDFLDAFLNYMQAQDIAV

SEQ ID NO: 19 - protein, 1238 aa, Candidatus Methanoplasma termitum
MNNYDEFTKLYPIQKTIRFELKPQGRTMEHLETFNFFEEDRDRAEKYKILKEAIDEYHKKFIDEHLTNMSLDWNSLKQISEKYYKSREEKDKKVFLSEQKRMRQEIVSEFKKDDRFKDLFSKKLFSELLKEEIYKKGNHQEIDALKSFDKFSGYFIGLHENRKNMYSDGDEITAISNRIVNENFPKFLDNLQKYQEARKKYPEWIIKAESALVAHNIKMDIVFSLEYFNKVLNQEGIQRYNLALGGYVTKSGEKMMGLNDALNLAHQSEKSSKGRIHMTPLFKQILSEKESFSYIPDVFTEDSQLLPSIGGFFAQIENDKDGNIFDRALELISSYAEYDTERIYIRQADINRVSNVIFGEWGTLGGLMREYKADSINDINLERTCKKVDKWLDSKEFALSDVLEAIDRTGNNDAFNEYISKMRTAREKIDAARKEMKFISEKISGDEESIHIIKTLLDSVQQFLHFFNLFKARQDIPLDGAFYAEFDEVHSKLFAIVPLYNKVRNYLTKNNLNTKKIKLNFKNPTLANGWDQNKVYDYASLIFLRDGNYYLGIINPKRKKNIKFEQGSGNGPFYRKMVYKQIPGPNKNLRPVFLTSTKGKKEYKPSKEIIEGYEADKHIRGDKFDLDFCHKLIDFFKESIEKHKDWSKFNFYFSPTESYGDISEFYLDVEKQGYRMHFENISAETIDEYVEKGDLFLFQIYNKDFVKAATGKKDMHTIYWNAAFSPENLQDVVVKLNGEAELFYRDKSDIKEIVHREGEILVNRTYNGRTPVPDKIHKKLTDYHNGRTKDLGEAKEYLDKVRYFKAHYDITKDRRYLNDKIYFHVPLTLNFKANGKKNLNKMVIEKFLSDEKAHIIGIDRGERNLLYYSIIDRSGKIIDQQSLNVIDGFDYREKLNQREIEMKDARQSWNAIGKIKDLKEGYLSKAVHEITKMAIQYNAIVVMEELNYGFKRGRFKVEKQIYQKFENMLIDKMNYLVFKDAPDESPGGVLNAYQLTNPLESFAKLGKQTGILFYVPAAYTSKIDPTTGFVNLFNTSSKTNAQERKEFLQKFESISYSAKDGGIFAFAFDYRKFGTSKTDHKNVWTAYTNGERMRYIKEKKRNELFDPSKEIKEALTSSGIKYDGGQNILPDILRSNNNGLIYTMYSSFIAAIQMRVYDGKEDYIISPIKNSKGEFFRTDPKRRELPIDADANGAYNIALRGELTMRAIAEKFDPDSEKMAKLELKHKDWFEFMQTRGD

SEQ ID NO: 20 - protein, 1281 aa, Eubacterium eligens
MNGNRSIVYREFVGVIPVAKTLRNELRPVGHTQEHIIQNGLIQEDELRQEKSTELKNIMDDYYREYIDKSLSGVTDLDFTLLFELMNLVQSSPSKDNKKALEKEQSKMREQICTHLQSDSNYKNIFNAKLLKEILPDFIKNYNQYDVKDKAGKLETLALFNGFSTYFTDFFEKRKNVFTKEAVSTSIAYRIVHENSLIFLANMTSYKKISEKALDEIEVIEKNNQDKMGDWELNQIFNPDFYNMVLIQSGIDFYNEICGVVNAHMNLYCQQTKNNYNLFKMRKLHKQILAYTSTSFEVPKMFEDDMSVYNAVNAFIDETEKGNIIGKLKDIVNKYDELDEKRIYISKDFYETLSCFMSGNWNLITGCVENFYDENIHAKGKSKEEKVKKAVKEDKYKSINDVNDLVEKYIDEKERNEFKNSNAKQYIREISNIITDTETAHLEYDDHISLIESEEKADEMKKRLDMYMNMYHWAKAFIVDEVLDRDEMFYSDIDDIYNILENIVPLYNRVRNYVTQKPYNSKKIKLNFQSPTLANGWSQSKEFDNNAIILIRDNKYYLAIFNAKNKPDKKIIQGNSDKKNDNDYKKMVYNLLPGANKMLPKVFLSKKGIETFKPSDYIISGYNAHKHIKTSENFDISFCRDLIDYFKNSIEKHAEWRKYEFKFSATDSYSDISEFYREVEMQGYRIDWTYISEADINKLDEEGKIYLFQIYNKDFAENSTGKENLHTMYFKNIFSEENLDKIIKLNGQAELFYRRASVKNPVKHKKDSVLVNKTYKNQLDNGDVVRIPIPDDIYNEIYKMYNGYIKESDLSEAAKEYLDKVEVRTAQKDIVKDYRYTVDKYFIHTPITINYKVTARNNVNDMVVKYIAQNDDIHVIGIDRGERNLIYISVIDSHGNIVKQKSYNILNNYDYKKKLVEKEKTREYARKNWKSIGNIKELKEGYISGVVHEIAMLIVEYNAIIAMEDLNYGFKRGRFKVERQVYQKFESMLINKLNYFASKEKSVDEPGGLLKGYQLTYVPDNIKNLGKQCGVIFYVPAAFTSKIDPSTGFISAFNFKSISTNASRKQFFMQFDEIRYCAEKDMFSFGFDYNNFDTYNITMGKTQWTVYTNGERLQSEFNNARRTGKTKSINLTETIKLLLEDNEINYADGHDIRIDMEKMDEDKKSEFFAQLLSLYKLTVQMRNSYTEAEEQENGISYDKIISPVINDEGEFFDSDNYKESDDKECKMPKDADANGAYCIALKGLYEVLKIKSEWTEDGFDRNCLKLPHAEWLDFIQNKRYE

SEQ ID NO: 21 - protein, 1300 aa, Francisella novicida
MSIYQEFVNKYSLSKTLRFELIPQGKTLENIKARGLILDDEKRAKDYKKAKQIIDKYHQFFIEEILSSVCISEDLLQNYSDVYFKLKKSDDDNLQKDFKSAKDTIKKQISEYIKDSEKFKNLFNQNLIDAKKGQESDLILWLKQSKDNGIELFKANSDITDIDEALEIIKSFKGWTTYFKGFHENRKVNYSSNDIPTSIIYRIVDDNLPKFLENKAKYESLKDKAPEAINYEQIKKDLAEELTFDIDYKTSEVNQRVFSLDEVFEIANFNNYLNQSGITKFNTIIGGKFVNGENTKRKGINEYINLYSQQINDKTLKKYKMSVLFKQILSDTESKSFVIDKLEDDSDVVTTMQSFYEQIAAFKTVEEKSIKETLSLLFDDLKAQKLDLSKIYFKNDKSLTDLSQQVFDDYSVIGTAVLEYITQQIAPKNLDNPSKKEQELIAKKTEKAKYLSLETIKLALEEFNKHRDIDKQCRFEEILANFAAIPMIFDEIAQNKDNLAQISIKYQNQGKKDLLQASAEDDVKAIKDLLDQTNNLLHKLKIFHISQSEDKANILDKDEHFYLVFEECYFELANIVPLYNKIRNYITQKPYSDEKFKLNFENSTLANGWDKNKEPDNTAILFIKDDKYYLGVMNKKNNKIFDDKAIKENKGEGYKKIVYKLLPGANKMLPKVFFSAKSIKFYNPSEDILRIRNHSTHTKNGSPQKGYEKFEFNIEDCRKFIDFYKQSISKHPEWKDFGFRFSDTQRYNSIDEFYREVENQGYKLTFENISESYIDSVVNQGKLYLFQIYNKDFSAYSKGRPNLHTLYWKALFDERNLQDVVYKLNGEAELFYRKQSIPKKITHPAKEAIANKNKDNPKKESVFEYDLIKDKRFTEDKFFFHCPITINFKSSGANKFNDEINLLLKEKANDVHILSIDRGERHLAYYTLVDGKGNIIKQDTFNIIGNDRMKTNYHDKLAAIEKDRDSARKDWKKINNIKEMKEGYLSQVVHEIAKLVIEYNAIVVFEDLNFGFKRGRFKVEKQVYQKLEKMLIEKLNYLVFKDNEFDKTGGVLRAYQLTAPFETFKKMGKQTGIIYYVPAGFTSKICPVTGFVNQLYPKYESVSKSQEFFSKFDKICYNLDKGYFEFSFDYKNFGDKAAKGKWTIASFGSRLINFRNSDKNHNWDTREVYPTKELEKLLKDYSIEYGHGECIKAAICGESDKKFFAKLTSVLNTILQMRNSKTGTELDYLISPVADVNGNFFDSRQAPKNMPQDADANGAYHIGLKGLMLLGRIKNNQEGKKLNLVIKNEEYFEFVQNRNN

SEQ ID NO: 22 - protein, 1206 aa, Unknown
  Lachnospiraceae bacterium
MYYESLTKQYPVSKTIRNELIPIGKTLDNIRQNNILESDVKRKQNYEHVKGILDEYHKQLINEALDNCTLPSLKIAAEIYLKNQKEVSDREDFNKTQDLLRKEVVEKLKAHENFTKIGKKDILDLLEKLPSISEDDYNALESFRNFYTYFTSYNKVRENLYSDKEKSSTVAYRLINENFPKFLDNVKSYRFVKTAGILADGLGEEEQDSLFIVETFNKTLTQDGIDTYNSQVGKINSSINLYNQKNQKANGFRKIPKMKMLYKQILSDREESFIDEFQSDEVLIDNVESYGSVLIESLKSSKVSAFFDALRESKGKNVYVKNDLAKTAMSVIVFENWRTFDDLLNQEYDLANENKKKDDKYFEKRQKELKKNKSYSLEHLCNLSEDSCNLIENYIHQISDDIENIIINNETFLRIVINEHDRSRKLAKNRKAVKAIKDFLDSIKVLERELKLINSSGQELEKDLIVYSAHEELLVELKQVDSLYNMTRNYLTKKPFSTEKVKLNFNRSTLLNGWDRNKETDNLGVLLLKDGKYYLGIMNTSANKAFVNPPVAKTEKVFKKVDYKLLPVPNQMLPKVFFAKSNIDFYNPSSEIYSNYKKGTHKKGNMFSLEDCHNLIDFFKESISKHEDWSKFGFKFDTQASYNDISEFYREVEKQGYKLTYTDIDETYINDLIERNELYLFQIYNKDFSMYSKGKLNLHTLYFMMLFDQRNIDDVVYKLNGEAEVFYRPASISEDELIIHKAGEEIKNKNPNRARTKETSTFSYDIVKDKRYSKDKFTLHIPITMNFGVDEVKRFNDAVNSAIRIDENVNVIGIDRGERNLLYVVVIDSKGNILEQISLNSIINKEYDIETDYHALLDEREGGRDKARKDWNTVENIRDLKAGLYLQVVNVVAKLVLKYNAIICLEDLNFGFKRGRQKVEKQVYQKFEKMLIDKLNYLVIDKSREQTSPKELGGALNALQLTSKFKSFKELGKQSGVIYYVPAYLTSKIDPTTGFANLFYMKCENVEKSKRFFDGFDFIRFNALENVFEFGFDYRSFTQRACGINSKWTVCTNGERIIKYRNPDKNNMFDEKVVVVTDEMKNLFEQYKIPYEDGRNVKDMIISNEEAEFYRRLYRLLQQTLQMRNSTSDGTRDYIISPVKNKREAYFNSELSDGSVPKDADANGAYNIARKGLWVLEQIRQKSEGEKINLAMTNAEWLEYAQTHLL

SEQ ID NO: 23 - protein, 1233 aa, Unknown
  Lachnospiraceae bacterium
MDYGNGQFERRAPLTKTITLRLKPIGETRETIREQKLLEQDAAFRKLVETVTPIVDDCIRKIADNALCHFGTEYDFSCLGNAISKNDSKAIKKETEKVEKLLAKVLTENLPDGLRKVNDINSAAFIQDTLTSFVQDDADKRVLIQELKGKTVLMQRFLTTRITALTVWLPDRVFENFNIFIENAEKMRILLDSPLNEKIMKFDPDAEQYASLEFYGQCLSQKDIDSYNLIISGIYADDEVKNPGINEIVKEYNQQIRGDKDESPLPKLKKLHKQILMPVEKAFFVRVLSNDSDARSILEKILKDTEMLPSKIIEAMKEADAGDIAVYGSRLHELSHVIYGDHGKLSQIIYDKESKRISELMETLSPKERKESKKRLEGLEEHIRKSTYTFDELNRYAEKNVMAAYIAAVEESCAEIMRKEKDLRTLLSKEDVKIRGNRHNTLIVKNYFNAWTVFRNLIRILRRKSEAEIDSDFYDVLDDSVEVLSLTYKGENLCRSYITKKIGSDLKPEIATYGSALRPNSRWWSPGEKFNVKFHTIVRRDGRLYYFILPKGAKPVELEDMDGDIECLQMRKIPNPTIFLPKLVFKDPEAFFRDNPEADEFVFLSGMKAPVTITRETYEAYRYKLYTVGKLRDGEVSEEEYKRALLQVLTAYKEFLENRMIYADLNFGFKDLEEYKDSSEFIKQVETHNTFMCWAKVSSSQLDDLVKSGNGLLFEIWSERLESYYKYGNEKVLRGYEGVLLSILKDENLVSMRTLLNSRPMLVYRPKESSKPMVVHRDGSRVVDRFDKDGKYIPPEVHDELYRFFNNLLIKEKLGEKARKILDNKKVKVKVLESERVKWSKFYDEQFAVTFSVKKNADCLDTTKDLNAEVMEQYSESNRLILIRNTTDILYYLVLDKNGKVLKQRSLNIINDGARDVDWKERFRQVTKDRNEGYNEWDYSRTSNDLKEVYLNYALKEIAEAVIEYNAILIIEKMSNAFKDKYSFLDDVTFKGFETKKLAKLSDLHFRGIKDGEPCSFTNPLQLCQNDSNKILQDGVIFMVPNSMTRSLDPDTGFIFAINDHNIRTKKAKLNFLSKFDQLKVSSEGCLIMKYSGDSLPTHNTDNRVWNCCCNHPITNYDRETKKVEFIEEPVEELSRVLEENGIETDTELNKLNERENVPGKVVDAIYSLVLNYLRGTVSGVAGQRAVYYSPVTGKKYDISFIQAMNLNRKCDYYRIGSKERGEWTDFVAQLIN

SEQ ID NO: 24 - protein, 1227 aa, Unknown
  Lachnospiraceae bacterium
MSKLEKFTNCYSLSKTLRFKAIPVGKTQENIDNKRLLVEDEKRAEDYKGVKKLLDRYYLSFINDVLHSIKLKNLNNYISLFRKKTRTEKENKELENLEINLRKEIAKAFKGNEGYKSLFKKDIIETILPEFLDDKDEIALVNSFNGFTTAFTGFFDNRENMFSEEAKSTSIAFRCINENLTRYISNMDIFEKVDAIFDKHEVQEIKEKILNSDYDVEDFFEGEFFNFVLTQEGIDVYNAIIGGFVTESGEKIKGLNEYINLYNQKTKQKLPKFKPLYKQVLSDRESLSFYGEGYTSDEEVLEVFRNTLNKNSEIFSSIKKLEKLFKNFDEYSSAGIFVKNGPAISTISKDIFGEWNVIRDKWNAEYDDIHLKKKAVVTEKYEDDRRKSFKKIGSFSLEQLQEYADADLSVVEKLKEIIIQKVDEIYKVYGSSEKLFDADFVLEKSLKKNDAVVAIMKDLLDSVKSFENYIKAFFGEGKETNRDESFYGDFVLAYDILLKVDHIYDAIRNYVTQKPYSKDKFKLYFQNPQFMGGWDKDKETDYRATILRYGSKYYLAIMDKKYAKCLQKIDKDDVNGNYEKINYKLLPGPNKMLPKVFFSKKWMAYYNPSEDIQKIYKNGTFKKGDMFNLNDCHKLIDFFKDSISRYPKWSNAYDFNFSETEKYKDIAGFYREVEEQGYKVSFESASKKEVDKLVEEGKLYMFQIYNKDFSDKSHGTPNLHTMYFKLLFDENNHGQIRLSGGAELFMRRASLKKEELVVHPANSPIANKNPDNPKKTTTLSYDVYKDKRFSEDQYELHIPIANINKCPKNIFKINTEVRVLLKHDDNPYVIGIDRGERNLLYIVVVDGKGNIVEQYSLNEIINNFNGIRIKTDYHSLLDKKEKERFEARQNWTSIENIKELKAGYISQVVHKICELVEKYDAVIALEDLNSGFKNSRVKVEKQVYQKFEKMLIDKLNYMVDKKSNPCATGGALKGYQITNKFESFKSMSTQNGFIFYIPAWLTSKIDPSTGFVNLLKTKYTSIADKKFISSFDRIMYVPEEDLFEFALDYKNFSRTDADYIKKWKLYSYGNRIRIFRNPKKNNVFDWEEVCLTSAYKELFNKYGINYQQGDIRALLCEQSDKAFYSSFMALMSLMLQMRNSITGRTDVDFLISPVKNSDGIFYDSRNYEAQENAILPKNADANGAYNIARKVLWAIGQFKKAEDEKLDKVKIASNKEWLEYAQTSVKH

SEQ ID NO: 25 - protein, 1264 aa, Leptospira inadai
MEDYSGFVNIYSIQKTLRFELKPVGKTLEHIEKKGFLKKDKIRAEDYKAVKKIIDKYHRAYIEEVFDSVLHQKKKKDKTRFSTQFIKEIKEFSELYYKTEKNIPDKERLEALSEKLRKMLVGAFKGEFSEEVAEKYNKNLFSKELIRNEIEKFCETDEERKQVSNFKSFTTYFTGFHSNRQNIYSDEKKSTAIGYRIIHQNLPKFLDNLKIIESIQRRFKDFPWSDLKKNLKKIDKNIKLTEYFSIDGFVNVLNQKGIDAYNTILGGKSEESGEKIQGLNEYINLYRQKNNIDRKNPLNVKILFKQILGDRETKSFIPEAFPDDQSVLNSITEFAKYLKLDKKKKSIIAELKKFLSSFNRYELDGIYLANDNSLASISTFLFDDWSFIKKSVSFKYDESVGDPKKKIKSPLKYEKEKEKWLKQKYYTISFLNDAIESYSKSQDEKRVKIRLEAYFAEFKSKDDAKKQFDLLERIEEAYAIVEPLLGAEYPRDRNLKADKKEVGKIKDFLDSIKSLQFFLKPLLSAEIFDEKDLGFYNQLEGYYEEIDISGHLYNKVRNYLTGKIYSKEKFKLNFENSTLLKGWDENREVANLCVIFREDQKYYLGVMDKENNTILSDIPKVKPNELFYEKMVYKLIPTPHMQLPRIIFSSDNLSIYNPSKSILKIREAKSFKEGKNFKLKDCHKFIDFYKESISKNEDWSRFDFKFSKTSSYENISEFYREVERQGYNLDFKKVSKFYIDSLVEDGKLYLFQIYNKDFSIFSKGKPNLHTIYFRSLFSKENLKDVCLKLNGEAEMFFRKKSINYDEKKKREGHHPELFEKLKYPILKDKRYSEDKFQFHLPISLNFKSKERLNFNLKVNEFLKRNKDINIIGIDRGERNLLYLVMINQKGEILKQTLLDSMQSGKGRPEINYKEKLQEKEIERDKARKSWGTVENIKELKEGYLSIVIHQISKLMVENNAIVVLEDLNIGFKRGRQKVERQVYQKFEKMLIDKLNFLVFKENKPTEPGGVLKAYQLTDEFQSFEKLSKQTGFLFYVPSWNTSKIDPRTGFIDFLHPAYENIEKAKQWINKFDSIRFNSKMDWFEFTADTRKFSENLMLGKNRVWVICTTNVERYFTSKTANSSIQYNSIQITEKLKELFVDIPFSNGQDLKPEILRKNDAVFFKSLLFYIKTTLSLRQNNGKKGEEEKDFILSPVVDSKGRFFNSLEASDDEPKDADANGAYHIALKGLMNLLVLNETKEENLSRPKWKIKNKDWLEFVWERNR

SEQ ID NO: 26 - protein, 1373 aa, Moraxella bovoculi
MLFQDFTHLYPLSKTVRFELFIDRTLEHIHAKNFLSQDETMADMHQKVKVILDDYHRDFIADMMGEVKLTKLAEFYDVYLKFRKNPKDDELQKAQLKDLQAVLRKEIVKPIGNGGKYKAGYDRLFGAKLFKDGKELGDLAKFVIAQEGESSPKLAHLAHFEKFSTYFTGFHDNRKNMYSDEDKHTAIAYRLIHENLPRFIDNLQILTTIKQKHSALYDQIINELTASGLDVSLASHLDGYHKLLTQEGITAYNTLLGGISGEAGSPKIQGINELINSHHNQHCHKSERIAKLRPLHKQILSDGMSVSFLPSKFADDSEMCQAVNEFYRHYADVFAKVQSLFDGFDDHQKDGIYVEHKNLNELSKQAFGDFALLGRVLDGYYVDVVNPEFNERFAKAKTDNAKAKLTKEKDKFIKGVHSLASLEQAIEHYTARHDDESVQAGKLGQYFKHGLAGVDNPIQKIHNNHSTIKGFLERERPAGERALPKIKSGKNPEMTQLRQLKELLDNALNVAHFAKLLTTKTTLDNQDGNFYGEFGVLYDELAKIPTLYNKVRDYLSQKPFSTEKYKLNFGNPTLLNGWDLNKEKDNFGVILQKDGCYYLALLDKAHKKVFDNAPNTGKSIYQKMIYKYLEVRKQFPKVFFSKEAIAINYHPSKELVEIKDKGRQRSDDERLKLYRFILECLKIHPKYDKKFEGAIGDIQLFKKDKKGREVPISEKDLFKDINGIFSSKPKLEMEDFFIGEFKRYNPSQDLVDQYNIYKKIDSNDNRKKENFYNNHPKFKKDLVRYYYESMCKHEEWEESFEFSKKLQDIGCYVDVNELFTEIETRRLNYKISFCNINADYIDELVEQGQLYLFQIYNKDFSPKAHGKPNLHTLYFKALFSEDNLADPIYKLNGEAQIFYRKASLDMNETTIHRAGEVLENKNPDNPKKRQFVYDIIKDKRYTQKDFMLHVPITMNFGVQGMTIKEFNKKVNQSIQQYDEVNVIGIDRGERHLLYLTVINSKGEILEQCSLNDITTASANGTQMTTPYHKILDKREIERLNARVGWGEIETIKELKSGYLSHVVHQISQLMLKYNAIVVLEDLNFGFKRGRFKVEKQIYQNFENALIKKLNHLVLKDKADDEIGSYKNALQLTNNFTDLKSIGKQTGFLFYVPAWNTSKIDPETGFVDLLKPRYENIQASQAFFGKFDKICYNADKDYFEFHIDYAKFTDKAKNSRQIWTICSHGDKRYVYDKTANQNKGAAKGINVNDILKSLFARHHINEKQPNLVMDICQNNDKEFHKSLMYLLKTLLALRYSNASSDEDFILSPVANDEGVFFNSALADDTQPQNADANGAYHIALKGLWLLNELKNSDDLNKVKLAIDNQTWLNFAQNR

SEQ ID NO: 27 - protein, 1352 aa, Unknown
  Parcubacteria bacterium
MENIFDQFIGKYSLSKTLRFELKPVGKTEDFLKINKVFEKDQTIDDSYNQAKFYFDSLHQKFIDAALASDKTSELSFQNFADVLEKQNKIILDKKREMGALRKRDKNAVGIDRLQKEINDAEDIIQKEKEKIYKDVRTLFDNEAESWKTYYQEREVDGKKITESKADLKQKGADFLTAAGILKVLKYEFPEEKEKEFQAKNQPSLFVEEKENPGQKRYIFDSFDKFAGYLTKFQQTKKNLYAADGTSTAVATRIADNFIIFHQNTKVFRDKYKNNHTDLGFDEENIFEIERYKNCLLQREIEHIKNENSYNKIIGRINKKIKEYRDQKAKDTKLTKSDFPFFKNLDKQILGEVEKEKQLIEKTREKTEEDVLIERFKEFIENNEERFTAAKKLMNAFCNGEFESEYEGIYLKNKAINTISRRWFVSDRDFELKLPQQKSKNKSEKNEPKVKKFISIAEIKNAVEELDGDIFKAVFYDKKIIAQGGSKLEQFLVIWKYEFEYLFRDIERENGEKLLGYDSCLKIAKQLGIFPQEKEAREKATAVIKNYADAGLGIFQMMKYFSLDDKDRKNTPGQLSTNFYAEYDGYYKDFEFIKYYNEFRNFITKKPFDEDKIKLNFENGALLKGWDENKEYDFMGVILKKEGRLYLGIMHKNHRKLFQSMGNAKGDNANRYQKMIYKQIADASKDVPRLLLTSKKAMEKFKPSQEILRIKKEKTFKRESKNFSLRDLHALIEYYRNCIPQYSNWSFYDFQFQDTGKYQNIKEFTDDVQKYGYKISFRDIDDEYINQALNEGKMYLFEVVNKDIYNTKNGSKNLHTLYFEHILSAENLNDPVFKLSGMAEIFQRQPSVNEREKITTQKNQCILDKGDRAYKYRRYTEKKIMFHMSLVLNTGKGEIKQVQFNKIINQRISSSDNEMRVNVIGIDRGEKNLLYYSVVKQNGEIIEQASLNEINGVNYRDKLIEREKERLKNRQSWKPVVKIKDLKKGYISHVIHKICQLIEKYSAIVVLEDLNMRFKQIRGGIERSVYQQFEKALIDKLGYLVFKDNRDLRAPGGVLNGYQLSAPFVSFEKMRKQTGILFYTQAEYTSKTDPITGFRKNVYISNSASLDKIKEAVKKFDAIGWDGKEQSYFFKYNPYNLADEKYKNSTVSKEWAIFASAPRIRRQKGEDGYWKYDRVKVNEEFEKLLKVWNFVNPKATDIKQEIIKKIKAGDLQGEKELDGRLRNFWHSFIYLFNLVLELRNSFSLQIKIKAGEVIAVDEGVDFIASPVKPFFTTPNPYIPSNLCWLAVENADANGAYNIARKGVMILKKIREHAKKDPEFKKLPNLFISNAEWDEAARDWGKYAGTTALNLDH

SEQ ID NO: 28 - protein, 1260 aa, Porphyromonas crevioricanis
MDSLKDFTNLYPVSKTLRFELKPVGKTLENIEKAGILKEDEHRAESYRRVKKIIDTYHKVFIDSSLENMAKMGIENEIKAMLQSFCELYKKDHRTEGEDKALDKIRAVLRGLIVGAFTGVCGRRENTVQNEKYESLFKEKLIKEILPDFVLSTEAESLPFSVEEATRSLKEFDSFTSYFAGFYENRKNIYSTKPQSTAIAYRLIHENLPKFIDNILVFQKIKEPIAKELEHIRADFSAGGYIKKDERLEDIFSLNYYIHVLSQAGIEKYNALIGKIVTEGDGEMKGLNEHINLYNQQRGREDRLPLFRPLYKQILSDREQLSYLPESFEKDEELLRALKEFYDHIAEDILGRTQQLMTSISEYDLSRIYVRNDSQLTDISKKMLGDWNAIYMARERAYDHEQAPKRITAKYERDRIKALKGEESISLANLNSCIAFLDNVRDCRVDTYLSTLGQKEGPHGLSNLVENVFASYHEAEQLLSFPYPEENNLIQDKDNVVLIKNLLDNISDLQRFLKPLWGMGDEPDKDERFYGEYNYIRGALDQVIPLYNKVRNYLTRKPYSTRKVKLNFGNSQLLSGWDRNKEKDNSCVILRKGQNFYLAIMNNRHKRSFENKMLPEYKEGEPYFEKMDYKFLPDPNKMLPKVFLSKKGIEIYKPSPKLLEQYGHGTHKKGDTFSMDDLHELIDFFKHSIEAHEDWKQFGFKFSDTATYENVSSFYREVEDQGYKLSFRKVSESYVYSLIDQGKLYLFQIYNKDFSPCSKGTPNLHTLYWRMLFDERNLADVIYKLDGKAEIFFREKSLKNDHPTHPAGKPIKKKSRQKKGEESLFEYDLVKDRRYTMDKFQFHVPITMNFKCSAGSKVNDMVNAHIREAKDMHVIGIDRGERNLLYICVIDSRGTILDQISLNTINDIDYHDLLESRDKDRQQEHRNWQTIEGIKELKQGYLSQAVHRIAELMVAYKAVVALEDLNMGFKRGRQKVESSVYQQFEKQLIDKLNYLVDKKKRPEDIGGLLRAYQFTAPFKSFKEMGKQNGFLFYIPAWNTSNIDPTTGFVNLFHVQYENVDKAKSFFQKFDSISYNPKKDWFEFAFDYKNFTKKAEGSRSMWILCTHGSRIKNFRNSQKNGQWDSEEFALTEAFKSLFVRYEIDYTADLKTAIVDEKQKDFFVDLLKLFKLTVQMRNSWKEKDLDYLISPVAGADGRFFDTREGNKSLPKDADANGAYNIALKGLWALRQIRQTSEGGKLKLAISNKEWLQFVQERSYEKD

SEQ ID NO: 29 - protein, 1324 aa, Prevotella disiens
MENYQEFTNLFQLNKTLRFELKPIGKTCELLEEGKIFASGSFLEKDKVRADNVSYVKKEIDKKHKIFIEETLSSFSISNDLLKQYFDCYNELKAFKKDCKSDEEEVKKTALRNKCTSIQRAMREAISQAFLKSPQKKLLAIKNLIENVFKADENVQHFSEFTSYFSGFETNRENFYSDEEKSTSIAYRLVHDNLPIFIKNIYIFEKLKEQFDAKTLSEIFENYKLYVAGSSLDEVFSLEYFNNTLTQKGIDNYNAVIGKIVKEDKQEIQGLNEHINLYNQKHKDRRLPFFISLKKQILSDREALSWLPDMFKNDSEVIDALKGFYIEDGFENNVLTPLATLLSSLDKYNLNGIFIRNNEALSSLSQNVYRNFSIDEAIDAQNAELQTFNNYELIANALRAKIKKETKQGRKSFEKYEEYIDKKVKAIDSLSIQEINELVENYVSEFNSNSGNMPRKVEDYFSLMRKGDFGSNDLIENIKTKLSAAEKLLGTKYQETAKDIFKKDENSKLIKELLDATKQFQHFIKPLLGTGEEADRDLVFYGDFLPLYEKFEELTLLYNKVRNRLTQKPYSKDKIRLCFNKPKLMTGWVDSKTEKSDNGTQYGGYLFRKKNEIGEYDYFLGISSKAQLFRKNEAVIGDYERLDYYQPKANTIYGSAYEGENSYKEDKKRLNKVIIAYIEQIKQTNIKKSIIESISKYPNISDDDKVTPSSLLEKIKKVSIDSYNGILSFKSFQSVNKEVIDNLLKTISPLKNKAEFLDLINKDYQIFTEVQAVIDEICKQKTFIYFPISNVELEKEMGDKDKPLCLFQISNKDLSFAKTFSANLRKKRGAENLHTMLFKALMEGNQDNLDLGSGAIFYRAKSLDGNKPTHPANEAIKCRNVANKDKVSLFTYDIYKNRRYMENKFLFHLSIVQNYKAANDSAQLNSSATEYIRKADDLHIIGIDRGERNLLYYSVIDMKGNIVEQDSLNIIRNNDLETDYHDLLDKREKERKANRQNWEAVEGIKDLKKGYLSQAVHQIAQLMLKYNAIIALEDLGQMFVTRGQKIEKAVYQQFEKSLVDKLSYLVDKKRPYNELGGILKAYQLASSITKNNSDKQNGFLFYVPAWNTSKIDPVTGFTDLLRPKAMTIKEAQDFFGAFDNISYNDKGYFEFETNYDKFKIRMKSAQTRWTICTFGNRIKRKKDKNYWNYEEVELTEEFKKLFKDSNIDYENCNLKEEIQNKDNRKFFDDLIKLLQLTLQMRNSDDKGNDYIISPVANAEGQFFDSRNGDKKLPLDADANGAYNIARKGLWNIRQIKQTKNKDDLNLSISSTEWLDFVREKPYLK

SEQ ID NO: 30 - protein, 1484 aa, Unknown
  Peregrinibacteria bacterium
  misc_feature (1073)..(1073): Xaa can be any naturally occurring amino acid
MSNFFKNFTNLYELSKTLRFELKPVGDTLTNMKDHLEYDEKLQTFLKDQNIDDAYQALKPQFDEIHEEFITDSLESKKAKEIDFSEYLDLFQEKKELNDSEKKLRNKIGETFNKAGEKWKKEKYPQYEWKKGSKIANGADILSCQDMLQFIKYKNPEDEKIKNYIDDTLKGFFTYFGGFNQNRANYYETKKEASTAVATRIVHENLPKFCDNVIQFKHIIKRKKDGTVEKTERKTEYLNAYQYLKNNNKITQIKDAETEKMIESTPIAEKIFDVYYFSSCLSQKQIEEYNRIIGHYNLLINLYNQAKRSEGKHLSANEKKYKDLPKFKTLYKQIGCGKKKDLFYTIKCDTEEEANKSRNEGKESHSVEEIINKAQEAINKYFKSNNDCENINTVPDFINYILTKENYEGVYWSKAAMNTISDKYFANYHDLQDRLKEAKVFQKADKKSEDDIKIPEAIELSGLFGVLDSLADWQTTLFKSSILSNEKLKIITDSQTPSEALLKMIFNDIEKNMESFLKETNDIITLKKYKGNKEGTEKIKQWFDYTLAINRMLKYFLVKENKIKGNSLDTNISEALKTLIYSDDAEWFKWYDALRNYLTQKPQDEAKENKLKLNFDNPSLAGGWDVNKECSNFCVILKDKNEKKYLAMIKKGENTLFQKEWTEGRGKNLTKKSNPLFEINNCEILSKMEYDFWADVSKMIPKCSTQLKAVVNHFKQSDNEFIFPIGYKVTSGEKFREECKISKQDFELNNKVFNKNELSVTAMRYDLSSTQEKQYIKAFQKEYWELLFKQEKRDTKLTNNEIFNEWINFCNKKYSELLSWERKYKDALTNWINFCKYFLSKYPKTTLFNYSFKESENYNSLDEFYRDVDICSYKLNINTTINKSILDRLVEEGKLYLFEIKNQDSNDGKSIGHKNNLHTIYWNAIFENFDNRPKLNGEAEIFYRKAISKDKLGIVKGKKTKNGTWIIKNYRFSKEKFILHVPITLNFCSNNEYVNDIVNTKFYNFSNLHFLGIDRGEKHLAYYSLVNKNGEIVDQGTLNLPFTDKDGNQRSIKKEKYFYNKQEDKWEAKEVDXWNYNDLLDAMASNRDMARKNWQRIGTIKEAKNGYVSLVIRKIADLAVNNERPAFIVLEDLNTGFKRSRQKIDKSVYQKFELALAKKLNFLVDKNAKRDEIGSPTKALQLTPPVNNYGDIENKKQAGIMLYTRANYTSQTDPATGWRKTIYLKAGPEETTYKKDGKIKNKSVKDQIIETFTDIGFDGKDYYFEYDKGEFVDEKTGEIKPKKWRLYSGENGKSLDRFRGEREKDKYEWKIDKIDIVKILDDLFVNFDKNISLLKQLKEGVELTRNNEHGTGESLRFAINLIQQIRNTGNNERDNDFILSPVRDENGKHFDSREYWDKETKGEKISMPSSGDANGAFNIARKGIIMNAHILANSDSKDLSLFVSDEEWDLHLNNKTEWKKQLNIFSSRKAMAKRKKKRPAATKK

SEQ ID NO: 31 - protein, 1245 aa, Porphyromonas macacae
MKTQHFFEDFTSLYSLSKTIRFELKPIGKTLENIKKNGLIRRDEQRLDDYEKLKKVIDEYHEDFIANILSSFSFSEEILQSYIQNLSISEARAKIEKTMRDTLAKAFSEDERYKSIFKKELVKKDIPVWCPAYKSLCKKFDNFTTSLVPFHENRKNLYTSNEITASIPYRIVHVNLPKFIQNIEALCELQKKMGADLYLEMMENLRNVWPSFVKTPDDLCNLKTYNHLMVQSSISEYNRFVGGYSTEDGTKHQGINEWINIYRQRNKEMRLPGLVFLHKQILAKVDSSSFISDTLENDDQVFCVLRQFRKLFWNTVSSKEDDAASLKDLFCGLSGYDPEAIYVSDAHLATISKNIFDRWNYISDAIRRKTEVLMPRKKESVERYAEKISKQIKKRQSYSLAELDDLLAHYSEESLPAGFSLLSYFTSLGGQKYLVSDGEVILYEEGSNIWDEVLIAFRDLQVILDKDFTEKKLGKDEEAVSVIKKALDSALRLRKFFDLLSGTGAEIRRDSSFYALYTDRMDKLKGLLKMYDKVRNYLTKKPYSIEKFKLHFDNPSLLSGWDKNKELNNLSVIFRQNGYYYLGIMTPKGKNLFKTLPKLGAEEMFYEKMEYKQIAEPMLMLPKVFFPKKTKPAFAPDQSVVDIYNKKTFKTGQKGFNKKDLYRLIDFYKEALTVHEWKLFNFSFSPTEQYRNIGEFFDEVREQAYKVSMVNVPASYIDEAVENGKLYLFQIYNKDFSPYSKGIPNLHTLYWKALFSEQNQSRVYKLCGGGELFYRKASLHMQDTTVHPKGISIHKKNLNKKGETSLFNYDLVKDKRFTEDKFFFHVPISINYKNKKITNVNQMVRDYIAQNDDLQHGIDRGERNLLYISRIDTRGNLLEQFSLNVIESDKGDLRTDYQKILGDREQERLRRRQEWKSIESIKDLKDGYMSQVVHKICNMVVEHKAIVVLENLNLSFMKGRKKVEKSVYEKFERMLVDKLNYLVVDKKNLSNEPGGLYAAYQLTNPLFSFEELHRYPQSGILFFVDPWNTSLTDPSTGFVNLLGRINYTNVGDARKFFDRFNAIRYDGKGNILFDLDLSRFDVRVETQRKLWTLTTFGSRIAKSKKSGKWMVERIENLSLCFLELFEQFNIGYRVEKDLKKAILSQDRKEFYVRLIYLFNLMMQIRNSDGEEDYILSPALNEKNLQFDSRLIEAKDLPVDADANGAYNVARKGLMVVQRIKRGDHESIHRIGRAQWLRYVQEGIVE

SEQ ID NO: 32 - protein, 1250 aa, Smithella sp.
MQTLFENFTNQYPVSKTLRFELIPQGKTKDFIEQKGLLKKDEDRAEKYKKVKNIIDEYHKDFIEKSLNGLKLDGLEKYKTLYLKQEKDDKDKKAFDKEKENLRKQIANAFRNNEKFKTLFAKELIKNDLMSFACEEDKKNVKEFEAFTTYFTGFHQNRANMYVADEKRTAIASRLIHENLPKFIDNIKIFEKMKKEAPELLSPFNQTLKDMKDVIKGTTLEEIFSLDYFNKTLTQSGIDIYNSVIGGRTPEEGKTKIKGLNEYINTDFNQKQTDKKKRQPKFKQLYKQILSDRQSLSFIAEAFKNDTEILEAIEKFYVNELLHFSNEGKSTNVLDAIKNAVSNLESFNLTKMYFRSGASLTDVSRKVFGEWSIINRALDNYYATTYPIKPREKSEKYEERKEKWLKQDFNVSLIQTAIDEYDNETVKGKNSGKVIADYFAKFCDDKETDLIQKVNEGYIAVKDLLNTPCPENEKLGSNKDQVKQIKAFMDSIMDIMHFVRPLSLKDTDKEKDETFYSLFTPLYDHLTQTIALYNKVRNYLTQKPYSTEKIKLNFENSTLLGGWDLNKETDNTAIILRKDNLYYLGIMDKRHNRIFRNVPKADKKDFCYEKMVYKLLPGANKMLPKVFFSQSRIQEFTPSAKLLENYANETHKKGDNFNLNHCHKLIDFFKDSINKHEDWKNFDFRFSATSTYADLSGFYHEVEHQGYKISFQSVADSFIDDLVNEGKLYLFQIYNKDFSPFSKGKPNLHTLYWKMLFDENNLKDVVYKLNGEAEVFYRKKSIAEKNTTIHKANESIINKNPDNPKATSTFNYDIVKDKRYTIDKFQFHIPITMNFKAEGIFNMNQRVNQFLKANPDINIIGIDRGERHLLYYALINQKGKILKQDTLNVIANEKQKVDYHNLLDKKEGDRATARQEWGVIETIKELKEGYLSQVIHKLTDLMIENNAIIVMEDLNFGFKRGRQKVEKQVYQKFEKMLIDKLNYLVDKNKKANELGGLLNAFQLANKFESFQKMGKQNGFIFYVPAWNTSKTDPATGFIDFLKPRYENLNQAKDFFEKFDSIRLNSKADYFEFAFDFKNFTEKADGGRTKWTVCTTNEDRYQWNRALNNNRGSQEKYDITAELKSLFDGKVDYKSGKDLKQQIASQESADFFKALMKNLSITLSLRHNNGEKGDNEQDYILSPVADSKGRFFDSRKADDDMPKNADANGAYHIALKGLWCLEQISKTDDLKKVKLAISNKEWLEFVQTLKG

SEQ ID NO: 33 - DNA, 3987 bp, Artificial sequence
  Synthetic polynucleotide
atggccgggagcaagaagcgccggataaagcaggacacgcagttcgagggcttcaccaacctgtaccaagtctccaagacgctccggttcgagcttatcccgcaagggaagaccctgaaacacatccaggaacaaggtttcatcgaggaggacaaggcccgcaacgaccactacaaggagctcaagcccataatcgatcggatctacaagacgtacgccgaccagtgcctccaactggtgcagctcgactgggagaacctgagcgccgccattgacagctaccgcaaggaaaagacggaggagacgcgcaacgcccttattgaggagcaagccacctaccgcaacgccatccacgactacttcatcgggcgcaccgacaacctgacggacgcgatcaacaagcgccacgcggaaatctacaagggccttttcaaggccgagctcttcaacgggaaggtcctaaaacagctcgggactgtcacgacaaccgagcatgagaacgccctccttcgcagcttcgacaagttcaccacatacttctcgggcttctaccggaaccgcaagaacgttttcagcgccgaggacatctccaccgccatcccgcacaggatcgtccaggacaacttccccaagttcaaggagaactgccacatcttcacgcgcctgattacagccgtaccttcacttcgtgagcacttcgagaacgtcaaaaaggccatcgggatcttcgtctccacgtccatcgaggaggtattctctttcccgttctataaccagctcctgacccagacgcagatcgacctctacaaccagctactgggcggcatcagccgggaggccgggaccgagaaaataaagggcctcaacgaagttctcaacctggccatccagaagaacgacgagaccgcgcatatcatcgcatccctgccgcatcgcttcattcctttgttcaagcagatattgagcgaccggaacaccctctcgttcatcctcgaagaattcaagagcgacgaggaggtcattcagtctttctgcaagtacaagacgctcctacggaatgagaatgtgctggagaccgcggaggcactcttcaatgagctgaactccattgacctgacccacatcttcattagccacaagaaactggagacgatctccagcgccctgtgcgaccactgggacactctccgcaacgccctctacgaacgccggatctccgaacttaccggcaagataactaagtcggctaaggagaaggtgcaacggagcctcaagcacgaggacatcaaccttcaggaaatcatctcagccgcgggcaaggagctgagcgaggcgtttaagcagaaaacatcggagatactgagccacgcgcacgcggccctggatcaaccgctgccgacgactctcaagaagcaagaggagaaggaaatccttaagtcccagctcgactcgctgctcggcctctatcacttgctcgactggttcgcggttgatgagtccaacgaggtggacccggagttctccgcgcgcctcacgggtattaagctggagatggagccaagcttaagcttctacaacaaggcccgcaactacgcgaccaaaaaaccgtactcagtcgagaaattcaagctgaatttccagatgcctacattggcgagggggtgggacgtgaaccgcgagaagaacaatggagccatcctgttcgtcaaaaatgggttgtactacctgggcatcatgcccaagcagaagggccgttacaaggccctgtcattcgagcctaccgagaagacctcggagggcttcgacaagatgtactacgactatttcccggacgccgccaagatgatcccgaagtgctccacgcagctcaaagccgtcacggcccacttccagacgcataccacgccgatacttctgagcaacaacttcattgagccgctagagatcacgaaggagatatacgacctaaacaaccccgaaaaggagcccaagaagttccagacagcctacgctaagaagacaggtgatcagaagggatatagggaggcactctgcaagtggatcgacttcacgcgcgacttcctgtcgaaatatacaaagacgaccagcattgacctaagttctctccgcccatcctcccagtacaaggatctgggcgagtattatgcggagctgaacccattgctgtaccacatcagcttccagaggatcgccgagaaggagattatggacgcggtggagacggggaaactatacctgttccaaatatataacaaggacttcgctaaagggcaccacgggaagcccaacctgcacacactctactggacgggcttgttttcgccagaaaatttggccaagacttcgatcaagctcaacggccaggcggagttgttttaccgtcccaagtctcgcatgaagcgcatggcgcatcgcctcggagagaaaatgcttaacaagaagctcaaggatcagaagacgcccatacctgatacgttgtaccaggaattgtacgactacgtgaaccaccgcctatcgcacgacctctcagacgaggcccgcgccctcctcccaaacgtgattactaaggaggtttcccatgaaataatcaaggaccgacggttcaccagcgacaaattttttttccacgtgcctatcacgctcaattaccaggcggccaactccccatcgaagttcaaccagcgcgtgaacgcctaccttaaggagcacccggagaccccaatcatcgggatcgaccgtggcgagcggaacctgatctatattacggtgatcgatagcaccgggaagatcctggagcagcgctccctgaacacaatccagcagtttgactaccagaagaaactcgacaaccgggagaaggagcgcgtcgcagcccggcaagcatggagtgtggtcggcaccataaaggacctgaaacagggttacctaagtcaagttatccacgagatcgttgacctgatgatacactatcaagccgtagtcgtgctggagaacctcaacttcgggtttaagtccaagcgcaccggcatcgcggagaaggcggtgtaccagcagttcgagaagatgctgatcgacaagctgaactgcctggtgctcaaggactaccctgcggagaaggtcggcggggtcttgaacccgtaccagctaaccgaccagttcacgagcttcgccaaaatgggcacgcagtccggattcttgttttatgtcccggctccatatacaagtaagatcgacccgctgacagggtttgttgacccattcgtgtggaagaccatcaagaaccacgagagcaggaaacacttcttagagggcttcgacttcctgcattacgacgttaagacaggcgacttcatcctgcacttcaagatgaaccgcaacctgtcgttccagaggggcctgcccggcttcatgcccgcctgggatatcgtctttgagaagaatgagacgcagttcgacgcgaaggggacgccgttcatcgctggaaagcggatcgtgccggtcatcgagaaccaccgcttcacgggtcgctaccgagatttataccccgccaacgaactaattgcgctgctggaggagaaggggatcgtgttccgagatggcagcaacattctcccgaagctgctggagaacgacgactcgcacgctattgacacgatggtcgccctcatacggagcgtgcttcagatgcggaacagtaacgctgccacgggcgaggactacattaactcccccgtccgcgacctcaacggggtctgcttcgatagccgcttccagaacccggagtggcctatggatgcggacgcgaacggggcctaccacatcgccctcaagggccaactcctgctcaaccacttgaaggaaagcaaagacctcaaattgcagaatggcatcagtaaccaggactggctcgcgtacatccaggaactgagaaacgggtccaagaagcggcgtatcaagcaagattga

SEQ ID NO: 34 - DNA, 3987 bp, Artificial sequence
  Synthetic polynucleotide
atggcgggaagcaaaaagcgccggattaagcaagacacgcagttcgagggcttcacgaacctctaccaagtcagcaagaccctccggttcgagctgataccacagggaaagacgctcaagcacatccaggaacagggcttcatcgaggaggacaaggcgcgcaacgaccactacaaggagttgaaaccgatcatcgaccgcatctacaagacgtacgccgaccagtgcctccagctcgtgcagctcgactgggagaacctctccgccgccattgactcgtaccggaaggagaagactgaggagacccgcaacgccctgatcgaggagcaagcaacctaccggaacgccatccacgactacttcatcggccgcaccgacaacctcaccgacgcgatcaacaagcggcacgcggagatatacaaagggctgttcaaggcggagctgttcaacggcaaggtgctcaagcagctagggacggtgaccacgaccgagcacgagaacgcgctcctccgcagcttcgacaagttcaccacctacttcagcggcttctaccggaaccgcaagaatgtgttcagcgcggaggacatcagcacggccatcccgcaccgcatcgtccaggacaacttcccgaagttcaaggagaactgccacatcttcacccgcctgataaccgccgtcccctccctgcgggagcacttcgagaacgtcaaaaaggcaattgggatcttcgtctcgaccagcattgaggaggtgttcagcttccccttctacaaccagctcctcacccagacgcagatcgacctgtacaatcagttgctcggcgggataagccgcgaggcgggaaccgaaaaaatcaaggggctgaacgaagtgttgaacctcgccatccagaagaacgacgagaccgcgcacatcatcgcctccctgccccaccggttcatcccgctgttcaagcagatcctctctgaccggaacaccctgtccttcattcttgaggagttcaagtcggacgaggaggtcatccagagcttctgcaagtacaagacgctgctacggaacgagaacgtgctggagacggcggaggcactgttcaacgagctaaacagcatcgacctcacgcacatcttcatcagtcacaagaaactggagaccatctcctccgcgctgtgcgaccactgggacacgctcaggaacgcgctctacgagcgccgaatcagtgagctgacgggcaagatcacgaagtccgcgaaggagaaggtgcagcggtccctcaagcacgaggacatcaacctccaggagatcatctcagcggctgggaaagagctgtccgaggcgttcaagcagaaaacgagcgaaatcctgtcccacgcgcacgcggccctggatcagcctctgccgacgaccctcaagaaacaagaagaaaaggaaatcctcaagtcgcagctcgactcgctgctgggcctgtaccatctcctcgactggttcgccgtggacgagagcaacgaggtggaccccgagttctccgcgcggcttacggggatcaagctggagatggagcccagcctgtccttctacaacaaggcgcgcaactacgccaccaagaagccctacagcgtggagaagttcaagctcaacttccagatgcccactctcgcacgtgggtgggacgtcaaccgcgaaaaaaataatggggcgatcctgttcgtcaagaacggcctgtactacttgggcatcatgccgaaacagaagggccgctacaaggccctgagcttcgaaccgaccgagaaaacgagcgaggggttcgacaagatgtactacgactacttccccgacgccgcgaagatgattccaaagtgctccacgcagcttaaggccgtgacggcccacttccagacgcacacgaccccgatcctcctcagcaacaacttcatcgagcccctggagatcacgaaggagatatacgacctgaacaacccggagaaggagcccaagaaattccagaccgcctacgccaagaagacaggcgaccaaaagggttacagggaggccctctgcaagtggatcgacttcactagggacttcctgtccaagtacaccaagactacctctatcgacctgtccagcctccgcccgtcgtcccagtacaaagatttgggcgagtattacgcggagctgaacccactgctctaccacatcagcttccagcgcatcgcggagaaggagatcatggacgcagtggagacgggcaagctatacctatttcagatatacaacaaagacttcgctaagggacaccacggcaagcctaacctgcacaccctctactggacggggctcttcagcccggagaacctcgccaagacctcgatcaagctcaacggccaggccgagctgttctaccggcccaagtcccgcatgaagcggatggcccaccggctcggggagaaaatgctcaacaagaaattgaaggaccaaaaaacgccgatacccgacaccctataccaggagctgtacgactatgtgaaccaccgcctgagccacgacctcagcgacgaggcgcgggccctcctgccgaacgtcatcacaaaggaggtcagccacgagatcatcaaggaccggcgcttcacctccgacaagtttttctttcacgtgcccatcacgctcaactaccaggccgccaactcgccgtccaagttcaaccagcgcgtgaacgcctacctcaaggagcaccccgagaccccgatcatcgggattgaccgaggggagcggaacctcatctacatcaccgtcatcgacagcaccgggaagatccttgaacagcggtcgctcaacaccatccagcagttcgactaccagaagaaactcgacaaccgggagaaggagagagtggcggcccgccaggcttggtccgtcgtcgggacgattaaggacttgaaacaaggttacctgtcgcaagtgatccacgagatcgttgacctgatgatccactaccaagccgtcgtggtcctggagaacctcaacttcggcttcaagagcaaacgaaccggcatcgcggagaaggccgtgtaccagcagttcgaaaaaatgctgatcgacaagctgaactgcctcgtgctcaaggactaccccgctgagaaggtcggcggggtgctgaacccgtaccagctcactgaccagttcaccagcttcgcaaagatgggcacccagtccggcttcctgttctacgtgcctgcgccatacacctcgaagatcgacccgctcaccgggttcgtggaccccttcgtctggaagaccatcaagaaccacgagagccgcaagcacttcctggagggcttcgacttcctccactacgacgtcaagaccggggacttcatcctgcacttcaagatgaaccgcaacctcagtttccagcgcggcctgccggggttcatgcccgcttgggatatagtcttcgagaagaatgagacgcagttcgacgcgaagggcaccccgttcatcgccgggaagcgcatcgtgccggtcatcgagaaccaccggttcaccgggcgctaccgcgacctatacccggcgaacgagttgatcgccctcctggaggagaagggcatcgtgttccgcgacggctccaacatcctcccgaagctgctcgaaaacgacgactcccacgccatcgacacgatggtcgcgctgatccggtcggtgctccagatgcggaactccaacgccgcgacgggcgaggactacatcaacagtccggtccgcgatctgaacggcgtctgcttcgactcccggttccagaaccccgagtggccgatggacgcggacgcgaacggcgcataccacatcgccctaaaagggcaattgctgctcaaccacctcaaggaatccaaagacctaaagctccagaacggcatctccaaccaggactggctggcgtacatccaggaactgcggaacgggagcaaaaaacgtcggatcaagcaagattga

SEQ ID NO: 35 - DNA, 3987 bp, Artificial sequence
  Synthetic polynucleotide
atggcgggctccaagaaacgccggattaagcaagatacccagttcgaggggttcacgaacctctaccaagtgagcaagaccctccgattcgaactgattcctcaggggaagaccctcaagcacatccaggagcaagggttcatcgaggaggacaaggcgcggaacgaccactacaaggaactcaaacccatcatcgaccgcatctacaagacctacgccgatcagtgcctccagctcgtgcagttggactgggagaacctcagcgcggccattgactcctaccggaaggagaaaacggaggagacgcgcaacgcgctcatcgaggaacaggcaacctatcgcaacgccatccacgactacttcatcgggaggactgacaacctcactgacgcgattaacaagcgccacgcggagatatacaagggactcttcaaagcggagctgtttaacggcaaggttctcaagcaactcggcactgtgaccacgaccgagcatgagaacgccctgctccgctccttcgacaagttcaccacctacttctccgggttctaccgcaaccgcaagaatgtcttcagcgcggaggacatcagcacggccattccacatcgaatcgtccaagataacttcccgaagttcaaggagaactgccacatcttcacccgactcattactgctgtaccgtcgttacgcgaacacttcgagaacgtcaagaaggcaattggaatcttcgtctctacgtcaatagaggaggtgttcagcttccctttctacaaccagctccttacgcagacccagatagacctgtacaatcagctcctcggtgggatcagccgggaggcggggactgagaagattaaagggctcaacgaggtcttgaacctggccatccaaaaaaacgatgagacggcgcacatcatcgcctcgctgccccaccggttcatcccgctgttcaagcagatcctcagtgacaggaacaccttgagctttatcctagaggagttcaagagcgacgaggaggtgatccagagcttctgcaagtacaaaaccctgctgaggaacgagaacgtcctggagacggcggaggcgctgttcaacgagctgaactctatcgacttaactcacatattcatctcgcacaagaagctggagactattagctctgcactctgcgaccactgggacaccctccgcaacgcgctctacgagcgccgcatctcggagctgaccgggaagatcaccaaatccgcgaaggaaaaggtccagcgttccctcaaacacgaggatattaacttacaggagattatctcagcggctgggaaggagttgtcagaggcgttcaagcagaaaacttccgagatcctgagccacgcgcacgcagcgctcgaccagcctctgcccaccaccctcaaaaagcaggaagaaaaagagatcctcaagagccagttggactccctgctggggctctatcaccttctcgactggttcgccgtcgatgagtcgaacgaggtggaccccgagttctccgcccggctgaccggcatcaagctagagatggagccgtccctcagcttctacaataaggcccgcaactacgcgaccaaaaaaccctacagcgtggagaagttcaagctgaacttccagatgccgaccttagcacgcggttgggacgtaaacagggagaagaacaatggagccatcctgttcgtcaagaacgggctttactacctcgggataatgcccaagcagaagggccgctacaaggccctttccttcgagccgacggagaaaacctccgaggggttcgacaagatgtactacgactacttccccgacgccgccaagatgatcccgaagtgctcaacgcagctaaaagccgtgaccgcccacttccagacccacacgacgccgatcctgctgagcaacaacttcatcgagccccttgagatcactaaggagatatacgacctgaacaaccccgagaaggagcccaagaagtttcaaaccgcctacgccaaaaaaactggcgaccaaaagggctacagggaggcgctgtgtaagtggatcgacttcacacgcgacttcctttcgaagtatacgaagacaacctctattgacctgagcagcctgcgtcctagctcccagtacaaagatttgggcgagtactacgcggagcttaatccactactctaccacatctcattccagcgcatcgctgagaaggaaatcatggacgcggtggagacaggcaaactgtacctcttccagatatacaacaaagacttcgctaaggggcaccacgggaagcccaaccttcatacgctctactggacgggcctattcagccccgaaaatctggccaagacctccatcaagctgaacggccaagcggagctgttctacagacccaagagccggatgaagcggatggcccacaggctcggcgagaaaatgcttaacaaaaagttgaaggaccagaaaacccctatccccgacaccctctaccaggaactgtacgactacgtgaaccacaggctctcgcacgacctttccgacgaggcccgtgccctactcccgaacgtcattaccaaagaggtttcgcacgagatcatcaaggaccggcggttcacgagcgacaagtttttctttcacgtccccatcacccttaactaccaggcggccaactccccatccaagttcaaccagcgtgtgaatgcctacctcaaggagcacccagagaccccgatcattgggatcgaccggggcgagcggaacctgatctacatcaccgtcatcgactcgacgggcaagattcttgagcagagatcgttgaataccatacagcagttcgactaccagaagaaactcgacaaccgcgagaaggagcgcgtggcggcccgccaggcgtggtccgtcgttgggacgattaaggacttgaaacaaggttatctgtcccaagtcatccacgagatcgttgatctgatgatccactatcaggcagtggtggtgctggagaatctcaacttcggcttcaagagtaagcggacgggaatcgccgagaaggccgtgtaccagcagttcgagaagatgctgatcgacaagctcaactgccttgtgctgaaagactacccggccgagaaggtcggcggcgtcctcaacccgtaccaacttaccgaccagttcacctccttcgccaagatgggcactcagtccgggttcttgttctacgtccccgcaccttacacctctaagatcgaccctctgactggcttcgtagatccattcgtgtggaagaccattaagaaccacgagagccgcaagcacttcctggagggcttcgacttcctgcactacgacgtgaagaccggggacttcatccttcacttcaagatgaaccggaacctcagcttccagcggggcctgccggggttcatgcccgcctgggacatcgtgttcgagaagaacgagacccagttcgacgcgaagggcacgcccttcatcgccgggaagcgtatcgtgccggtgatcgagaaccatcgtttcacgggtcgctaccgtgacctctacccggcgaacgagcttatcgcactcctggaggagaagggcatcgtcttccgggacggctccaacatcctcccgaaactgctggaaaacgacgactctcacgccatcgacacgatggtggccctcatccggtccgtgctccaaatgcggaacagcaacgccgccaccggtgaggactacatcaacagcccggtccgggatctgaacggggtgtgcttcgattcgcggttccagaatcctgagtggccgatggacgcggatgcaaacggggcgtaccacatcgcgctcaagggccagttacttctgaaccaccttaaggagtctaaagatttgaaactccagaacgggatctcgaaccaggactggctggcctacatccaagagttgcggaacggcagcaagaagcggcggattaagcaagattag

SEQ ID NO: 36 - protein, 228 aa, Rattus norvegicus
SSETGPVAVDPTLRRRIEPHEFEVFFDPRELRKETCLLYEINWGGRHSIWRHTSQNTNKHVEVNFIEKFTTERYFCPNTRCSITWFLSWSPCGECSRAITEFLSRYPHVTLFIYIARLYHHADPRNRQGLRDLISSGVTIQIMTEQESGYCWRNFVNYSPSNEAHWPRYPHLWVRLYVLELYCIILGLPPCLNILRRKQPQLTFFTIALQSCHYQRLPPHILWATGLK

SEQ ID NO: 37 - protein, 199 aa, Homo sapiens
MEASPASGPRHLMDPHIFTSNFNNGIGRHKTYLCYEVERLDNGTSVKMDQHRGFLHNQAKNLLCGFYGRHAELRFLDLVPSLQLDPAQIYRVTWFISWSPCFSWGCAGEVRAFLQENTHVRLRIFAARIYDYDPLYKEALQMLRDAGAQVSIMTYDEFKHCWDTFVDHQGCPFQPWDGLDEHSQALSGRLRAILQNQGN

SEQ ID NO: 38 - DNA, 621 bp, Petromyzon marinus
acagatgcagagtatgtgagaattcacgaaaagctggacatctataccttcaagaagcagttctttaacaataagaagtctgtgagccataggtgctacgtgctgttcgagctgaagagaaggggtgaaagaagggcatgtttttgggggtatgctgtgaacaagccccagtctggaactgagagaggcattcacgccgaaattttcagcatcagaaaggtggaggaatacctgagggataaccctggacagtttacaattaattggtattctagctggtctccatgcgctgactgtgccgagaagatcctggaatggtacaaccaggagctgagaggaaatggccataccctgaagatttgggcctgcaagctgtactatgaaaagaacgcaagaaatcagatcggactgtggaacctgagggataatggtgtggggctgaacgtgatggtgtccgagcactatcagtgctgtagaaagattttcattcagtcctcacataatcagctgaacgagaatagatggctggaaaagactctgaagagggctgagaagagaaggtccgaactgtcaattatgatccaggtgaagatcctgcacaccactaagtcacctgccgtg

SEQ ID NO: 39 - protein, 160 aa, Artificial sequence
  Synthetic polypeptide
FERNYDPRELRKETYLLYEIKWGKSGKLWRHWCQNNRTQHAEVYFLENIFNARRFNPSTHCSITWYLSWSPCAECSQKIVDFLKEHPNVLEIYVARLYYHEDERNRQGLRDLVNSGVTIRIMDLPDYNYCWKTFVSDQGGDEDYWPGHFAPWIKQYSLKL

SEQ ID NO: 40 - protein, 229 aa, Rattus norvegicus [sequence omitted]

SEQ ID NO: 41 - protein, 198 aa, Homo sapiens [sequence omitted]

SEQ ID NO: 42 - protein, 197 aa, Artificial sequence
  Synthetic polypeptide
MDSLLMNRREFLYQFKNVRWAKGRRETYLCYVVKRRDSATSFSLDFGYLRNKNGCHVELLFLRYISDWDLDPGRCYRVTWFISWSPCYDCARHVADFLRGNPNLSLRIFTARLYFCEDRKAEPEGLRRLHRAGVQIAIMTFKDYFYCWNTFVENHGRTFKAWEGLHENSVRLSRQLRRILLPLYEVDDLRDAFRTCT

SEQ ID NO: 43 - protein, 207 aa, Artificial sequence
  Synthetic polypeptide
TDAEYVRIHEKLDIYTFKKQFSNNKKSVSHRCYVLFELKRRGERRACFWGYAVNKPQSGTERGIHAEIFSIRKVEEYLRDNPGQFTINWYSSWSPCADCAEKILEWYNQELRGNGHTLKIWVCKLYYEKNARNQIGLWNLRDNGVGLNVMVSEHYQCCRKIFIQSSHNQLNENRWLEKTLKRAEKRRSELSIMFQVKILHTTKSPAV

SEQ ID NO: 44 - protein, 228 aa, Artificial sequence
  Synthetic polypeptide
SSKTGPVAVDPTLRRRIEPHEFEVFFDPRELRKETCLLYEINWGGRHSIWRHTSQNTNKHVEVNFIEKFTTERYFCPNTRCSITWFLSWSPCGECSRAITEFLSRYPNVTLFIYIARLYHLANPRNRQGLRDLISSGVTIQIMTEQESGYCWHNFVNYSPSNESHWPRYPHLWVRLYVLELYCIILGLPPCLNILRRKQSQLTSFTIALQSCHYQRLPPHILWATGLK

SEQ ID NO: 45 - protein, 162 aa, Artificial sequence
  Synthetic polypeptide
SFERNYDPRELRKETYLLYEIKWGKSGKLWRHWCQNNRTQHAEVYFLENIFNARRFNPSTHCSITWYLSWSPCAECSQKIVDFLKEHPNVNLEIYVARLYYPENERNRQGLRDLVNSGVTIRIMDLPDYNYCWKTFVSDQGGDEDYWPGHFAPWIKQYSLKL

SEQ ID NO: 46 - protein, 166 aa, Escherichia coli
SEVEFSHEYWMRHALTLAKRAWDEREVPVGAVLVHNNRVIGEGWNRPIGRHDPTAHAEIMALRQGGLVMQNYRLIDATLYVTLEPCVMCAGAMIHSRIGRVVFGARDAKTGAAGSLMDVLHHPGMNHRVEITEGILADECAALLSDFFRMRRQEIKAQKKAQSSTD

SEQ ID NO: 47 - protein, 166 aa, Artificial sequence
  Synthetic polypeptide
SEVEFSHEYWMRHALTLAKRARDEREVPVGAVLVLNNRVIGEGWNRAIGLHDPTAHAEIMALRQGGLVMQNYRLIDATLYVTFEPCVMCAGAMIHSRIGRVVFGVRNAKTGAAGSLMDVLHYPGMNHRVEITEGILADECAALLCYFFRMPRQVFNAQKKAQSSTD

SEQ ID NO: 48 - protein, 166 aa, Artificial sequence
  Synthetic polypeptide
SEVEFSHEYWMRHALTLAKRAWDEREVPVGAVLVLNNRVIGEGWNRSIGLHDPTAHAEIMALRQGGLVMQNYRLIDATLYVTFEPCVMCAGAMIHSRIGRVVFGVRNAKTGAAGSLMDVLHYPGMNHRVEITEGILADECAALLCYFFRMRRQVFNAQKKAQSSTD

SEQ ID NO: 49 - protein, 166 aa, Artificial sequence
  Synthetic polypeptide
SEVEFSHEYWMRHALTLAKRALDEREVPVGAVLVLNNRVIGEGWNRAIGLHDPTAHAEIMALRQGGLVMQNYRLIDATLYVTFEPCVMCAGAMIHSRIGRVVFGVRNAKTGAAGSLMDVLHYPGMNHRVEITEGILADECNALLCYFFRMRRQVFNAQKKAQSSTD

SEQ ID NO: 50 - protein, 166 aa, Artificial sequence
  Synthetic polypeptide
SEVEFSHEYWMRHALTLAKRALDEREVPVGAVLVLNNRVIGEGWNRAIGLHDPTAHAEIMALRQGGLVMQNYRLIDATLYVTFEPCVMCAGAMIHSRIGRVVFGVRNAKTGAAGSLMDVLHYPGMNHRVEITEGILADECNALLCYFFRMPRQVFNAQKKAQSSTD

SEQ ID NO: 51 - protein, 1763 aa, Artificial sequence
  Synthetic polypeptide
SEVEFSHEYWMRHALTLAKRAWDEREVPVGAVLVHNNRVIGEGWNRPIGRHDPTAHAEIMALRQGGLVMQNYRLIDATLYVTLEPCVMCAGAMIHSRIGRVVFGARDAKTGAAGSLMDVLHHPGMNHRVEITEGILADECAALLSDFFRMRRQEIKAQKKAQSSTDSGGSSGGSSGSETPGTSESATPESSGGSSGGSSEVEFSHEYWMRHALTLAKRARDEREVPVGAVLVLNNRVIGEGWNRAIGLHDPTAHAEIMALRQGGLVMQNYRLIDATLYVTFEPCVMCAGAMIHSRIGRVVFGVRNAKTGAAGSLMDVLHYPGMNHRVEITEGILADECAALLCYFFRMPRQVFNAQKKAQSSTDSGGSSGGSSGSETPGTSESATPESSGGSSGGSDKKYSIGLAIGTNSVGWAVITDEYKVPSKKFKVLGNTDRHSIKKNLIGALLFDSGETAEATRLKRTARRRYTRRKNRICYLQEIFSNEMAKVDDSFFHRLEESFLVEEDKKHERHPIFGNIVDEVAYHEKYPTIYHLRKKLVDSTDKADLRLIYLALAHMIKFRGHFLIEGDLNPDNSDVDKLFIQLVQTYNQLFEENPINASGVDAKAILSARLSKSRRLENLIAQLPGEKKNGLFGNLIALSLGLTPNFKSNFDLAEDAKLQLSKDTYDDDLDNLLAQIGDQYADLFLAAKNLSDAILLSDILRVNTEITKAPLSASMIKRYDEHHQDLTLLKALVRQQLPEKYKEIFFDQSKNGYAGYIDGGASQEEFYKFIKPILEKMDGTEELLVKLNREDLLRKQRTFDNGSIPHQIHLGELHAILRRQEDFYPFLKDNREKIEKILTFRIPYYVGPLARGNSRFAWMTRKSEETITPWNFEEVVDKGASAQSFIERMTNFDKNLPNEKVLPKHSLLYEYFTVYNELTKVKYVTEGMRKPAFLSGEQKKAIVDLLFKTNRKVTVKQLKEDYFKKIECFDSVEISGVEDRFNASLGTYHDLLKIIKDKDFLDNEENEDILEDIVLTLTLFEDREMIEERLKTYAHLFDDKVMKQLKRRRYTGWGRLSRKLINGIRDKQSGKTILDFLKSDGFANRNFMQLIHDDSLTFKEDIQKAQVSGQGDSLHEHIANLAGSPAIKKGILQTVKVVDELVKVMGRHKPENIVIEMARENQTTQKGQKNSRERMKRIEEGIKELGSQILKEHPVENTQLQNEKLYLYYLQNGRDMYVDQELDINRLSDYDVDHIVPQSFLKDDSIDNKVLTRSDKNRGKSDNVPSEEVVKKMKNYWRQLLNAKLITQRKFDNLTKAERGGLSELDKAGFIKRQLVETRQITKHVAQILDSRMNTKYDENDKLIREVKVITLKSKLVSDFRKDFQFYKVREINNYHHAHDAYLNAVVGTALIKKYPKLESEFVYGDYKVYDVRKMIAKSEQEIGKATAKYFFYSNIMNFFKTEITLANGEIRKRPLIETNGETGEIVWDKGRDFATVRKVLSMPQVNIVKKTEVQTGGFSKESILPKRNSDKLIARKKDWDPKKYGGFDSPTVAYSVLVVAKVEKGKSKKLKSVKELLGITIMERSSFEKNPIDFLEAKGYKEVKKDLIIKLPKYSLFELENGRKRMLASAGELQKGNELALPSKYVNFLYLASHYEKLKGSPEDNEQKQLFVEQHKHYLDEIIEQISEFSKRVILADANLDKVLSAYNKHRDKPIREQAENIIHLFTLTNLGAPAAFKYFDTTIDRKRYTSTKEVLDATLIHQSITGLYETRIDLSQLGGD

SEQ ID NO: 52 - protein, 1565 aa, Artificial sequence
  Synthetic polypeptide
SEVEFSHEYWMRHALTLAKRARDEREVPVGAVLVLNNRVIGEGWNRAIGLHDPTAHAEIMALRQGGLVMQNYRLIDATLYVTFEPCVMCAGAMIHSRIGRVVFGVRNSKRGAAGSLMNVLNYPGMNHRVEITEGILADECAALLCDFYRMPRQVFNAQKKAQSSINSGGSSGGSSGSETPGTSESATPESSGGSSGGSDKKYSIGLAIGTNSVGWAVITDEYKVPSKKFKVLGNTDRHSIKKNLIGALLFDSGETAEATRLKRTARRRYTRRKNRICYLQEIFSNEMAKVDDSFFHRLEESFLVEEDKKHERHPIFGNIVDEVAYHEKYPTIYHLRKKLVDSTDKADLRLIYLALAHMIKFRGHFLIEGDLNPDNSDVDKLFIQLVQTYNQLFEENPINASGVDAKAILSARLSKSRRLENLIAQLPGEKKNGLFGNLIALSLGLTPNFKSNFDLAEDAKLQLSKDTYDDDLDNLLAQIGDQYADLFLAAKNLSDAILLSDILRVNTEITKAPLSASMIKRYDEHHQDLTLLKALVRQQLPEKYKEIFFDQSKNGYAGYIDGGASQEEFYKFIKPILEKMDGTEELLVKLNREDLLRKQRTFDNGSIPHQIHLGELHAILRRQEDFYPFLKDNREKIEKILTFRIPYYVGPLARGNSRFAWMTRKSEETITPWNFEEVVDKGASAQSFIERMTNFDKNLPNEKVLPKHSLLYEYFTVYNELTKVKYVTEGMRKPAFLSGEQKKAIVDLLFKTNRKVTVKQLKEDYFKKIECFDSVEISGVEDRFNASLGTYHDLLKIIKDKDFLDNEENEDILEDIVLTLTLFEDREMIEERLKTYAHLFDDKVMKQLKRRRYTGWGRLSRKLINGIRDKQSGKTILDFLKSDGFANRNFMQLIHDDSLTFKEDIQKAQVSGQGDSLHEHIANLAGSPAIKKGILQTVKVVDELVKVMGRHKPENIVIEMARENQTTQKGQKNSRERMKRIEEGIKELGSQILKEHPVENTQLQNEKLYLYYLQNGRDMYVDQELDINRLSDYDVDHIVPQSFLKDDSIDNKVLTRSDKNRGKSDNVPSEEVVKKMKNYWRQLLNAKLITQRKFDNLTKAERGGLSELDKAGFIKRQLVETRQITKHVAQILDSRMNTKYDENDKLIREVKVITLKSKLVSDFRKDFQFYKVREINNYHHAHDAYLNAVVGTALIKKYPKLESEFVYGDYKVYDVRKMIAKSEQEIGKATAKYFFYSNIMNFFKTEITLANGEIRKRPLIETNGETGEIVWDKGRDFATVRKVLSMPQVNIVKKTEVQTGGFSKESILPKRNSDKLIARKKDWDPKKYGGFDSPTVAYSVLVVAKVEKGKSKKLKSVKELLGITIMERSSFEKNPIDFLEAKGYKEVKKDLIIKLPKYSLFELENGRKRMLASAGELQKGNELALPSKYVNFLYLASHYEKLKGSPEDNEQKQLFVEQHKHYLDEIIEQISEFSKRVILADANLDKVLSAYNKHRDKPIREQAENIIHLFTLTNLGAPAAFKYFDTTIDRKRYTSTKEVLDATLIHQSITGLYETRIDLSQLGGD

SEQ ID NO: 53 - protein, 1565 aa, Artificial sequence
  Synthetic polypeptide
SEVEFSHEYWMRHALTLAKRARDEREVPVGAVLVLNNRVIGEGWNRAIGLHDPTAHAEIMALRQGGLVMQNYRLYDATLYSTFEPCVMCAGAMIHSRIGRVVFGVRNAKTGAAGSLMDVLHHPGMNHRVEITEGILADECAALLCRFFRMPRRVFNAQKKAQSSTDSGGSSGGSSGSETPGTSESATPESSGGSSGGSDKKYSIGLAIGTNSVGWAVITDEYKVPSKKFKVLGNTDRHSIKKNLIGALLFDSGETAEATRLKRTARRRYTRRKNRICYLQEIFSNEMAKVDDSFFHRLEESFLVEEDKKHERHPIFGNIVDEVAYHEKYPTIYHLRKKLVDSTDKADLRLIYLALAHMIKFRGHFLIEGDLNPDNSDVDKLFIQLVQTYNQLFEENPINASGVDAKAILSARLSKSRRLENLIAQLPGEKKNGLFGNLIALSLGLTPNFKSNFDLAEDAKLQLSKDTYDDDLDNLLAQIGDQYADLFLAAKNLSDAILLSDILRVNTEITKAPLSASMIKRYDEHHQDLTLLKALVRQQLPEKYKEIFFDQSKNGYAGYIDGGASQEEFYKFIKPILEKMDGTEELLVKLNREDLLRKQRTFDNGSIPHQIHLGELHAILRRQEDFYPFLKDNREKIEKILTFRIPYYVGPLARGNSRFAWMTRKSEETITPWNFEEVVDKGASAQSFIERMTNFDKNLPNEKVLPKHSLLYEYFTVYNELTKVKYVTEGMRKPAFLSGEQKKAIVDLLFKTNRKVTVKQLKEDYFKKIECFDSVEISGVEDRFNASLGTYHDLLKIIKDKDFLDNEENEDILEDIVLTLTLFEDREMIEERLKTYAHLFDDKVMKQLKRRRYTGWGRLSRKLINGIRDKQSGKTILDFLKSDGFANRNFMQLIHDDSLTFKEDIQKAQVSGQGDSLHEHIANLAGSPAIKKGILQTVKVVDELVKVMGRHKPENIVIEMARENQTTQKGQKNSRERMKRIEEGIKELGSQILKEHPVENTQLQNEKLYLYYLQNGRDMYVDQELDINRLSDYDVDHIVPQSFLKDDSIDNKVLTRSDKNRGKSDNVPSEEVVKKMKNYWRQLLNAKLITQRKFDNLTKAERGGLSELDKAGFIKRQLVETRQITKHVAQILDSRMNTKYDENDKLIREVKVITLKSKLVSDFRKDFQFYKVREINNYHHAHDAYLNAVVGTALIKKYPKLESEFVYGDYKVYDVRKMIAKSEQEIGKATAKYFFYSNIMNFFKTEITLANGEIRKRPLIETNGETGEIVWDKGRDFATVRKVLSMPQVNIVKKTEVQTGGFSKESILPKRNSDKLIARKKDWDPKKYGGFDSPTVAYSVLVVAKVEKGKSKKLKSVKELLGITIMERSSFEKNPIDFLEAKGYKEVKKDLIIKLPKYSLFELENGRKRMLASAGELQKGNELALPSKYVNFLYLASHYEKLKGSPEDNEQKQLFVEQHKHYLDEIIEQISEFSKRVILADANLDKVLSAYNKHRDKPIREQAENIIHLFTLTNLGAPAAFKYFDTTIDRKRYTSTKEVLDATLIHQSITGLYETRIDLSQLGGD

SEQ ID NO: 54 - protein, 364 aa, Artificial sequence
  Synthetic polypeptide
SEVEFSHEYWMRHALTLAKRAWDEREVPVGAVLVHNNRVIGEGWNRPIGRHDPTAHAEIMALRQGGLVMQNYRLIDATLYVTLEPCVMCAGAMIHSRIGRVVFGARDAKTGAAGSLMDVLHHPGMNHRVEITEGILADECAALLSDFFRMRRQEIKAQKKAQSSTDSGGSSGGSSGSETPGTSESATPESSGGSSGGSSEVEFSHEYWMRHALTLAKRARDEREVPVGAVLVLNNRVIGEGWNRAIGLHDPTAHAEIMALRQGGLVMQNYRLIDATLYVTFEPCVMCAGAMIHSRIGRVVFGVRNAKTGAAGSLMDVLHYPGMNHRVEITEGILADECAALLCYFFRMPRQVFNAQKKAQSSTD

SEQ ID NO: 55 - protein, 167 aa, Artificial sequence
  Synthetic polypeptide
MSEVEFSHEYWMRHALTLAKRARDEREVPVGAVLVLNNRVIGEGWNRAIGLHDPTAHAEIMALRQGGLVMQNYRLYDATLYSTFEPCVMCAGAMIHSRIGRVVFGVRNAKTGAAGSLMDVLHHPGMNHRVEITEGILADECAALLCRFFRMPRRVFNAQKKAQSSTD

SEQ ID NO: 56 - protein, 167 aa, Artificial sequence
  Synthetic polypeptide
MSEVEFSHEYWMRHALTLAKRARDEREVPVGAVLVLNNRVIGEGWNRAIGLHDPTAHAEIMALRQGGLVMQNYRLIDATLYVTFEPCVMCAGAMIHSRIGRVVFGVRNSKRGAAGSLMNVLNYPGMNHRVEITEGILADECAALLCDFYRMPRQVFNAQKKAQSSIN

SEQ ID NO: 57 - RNA, 19 nt, Artificial sequence
  Synthetic RNA spacer
  misc_feature (1)..(19): n is a, c, g, or u
nnnnnnnnnnnnnnnnnnn

SEQ ID NO: 58 - DNA, 22 bp, Artificial sequence
  Synthetic target strand
  misc_feature (1)..(19): n is a, c, g, or t
nnnnnnnnnnnnnnnnnnnaaa

SEQ ID NO: 59 - DNA, 22 bp, Artificial sequence
  Synthetic non-target strand
  misc_feature (4)..(22): n is a, c, g, or t
tttnnnnnnnnnnnnnnnnnnn

SEQ ID NO: 60 - DNA, 4101 bp, Artificial sequence
  Synthetic polynucleotide
gacaagaagtacagcatcggcctggacatcggcaccaactctgtgggctgggccgtgatcaccgacgagtacaaggtgcccagcaagaaattcaaggtgctgggcaacaccgaccggcacagcatcaagaagaacctgatcggagccctgctgttcgacagcggcgaaacagccgaggccacccggctgaagagaaccgccagaagaagatacaccagacggaagaaccggatctgctatctgcaagagatcttcagcaacgagatggccaaggtggacgacagcttcttccacagactggaagagtccttcctggtggaagaggataagaagcacgagcggcaccccatcttcggcaacatcgtggacgaggtggcctaccacgagaagtaccccaccatctaccacctgagaaagaaactggtggacagcaccgacaaggccgacctgcggctgatctatctggccctggcccacatgatcaagttccggggccacttcctgatcgagggcgacctgaaccccgacaacagcgacgtggacaagctgttcatccagctggtgcagacctacaaccagctgttcgaggaaaaccccatcaacgccagcggcgtggacgccaaggccatcctgtctgccagactgagcaagagcagacggctggaaaatctgatcgcccagctgcccggcgagaagaagaatggcctgttcggaaacctgattgccctgagcctgggcctgacccccaacttcaagagcaacttcgacctggccgaggatgccaaactgcagctgagcaaggacacctacgacgacgacctggacaacctgctggcccagatcggcgaccagtacgccgacctgtttctggccgccaagaacctgtccgacgccatcctgctgagcgacatcctgagagtgaacaccgagatcaccaaggcccccctgagcgcctctatgatcaagagatacgacgagcaccaccaggacctgaccctgctgaaagctctcgtgcggcagcagctgcctgagaagtacaaagagattttcttcgaccagagcaagaacggctacgccggctacattgacggcggagccagccaggaagagttctacaagttcatcaagcccatcctggaaaagatggacggcaccgaggaactgctcgtgaagctgaacagagaggacctgctgcggaagcagcggaccttcgacaacggcagcatcccccaccagatccacctgggagagctgcacgccattctgcggcggcaggaagatttttacccattcctgaaggacaaccgggaaaagatcgagaagatcctgaccttccgcatcccctactacgtgggccctctggccaggggaaacagcagattcgcctggatgaccagaaagagcgaggaaaccatcaccccctggaacttcgaggaagtggtggacaagggcgcttccgcccagagcttcatcgagcggatgaccaacttcgataagaacctgcccaacgagaaggtgctgcccaagcacagcctgctgtacgagtacttcaccgtgtataacgagctgaccaaagtgaaatacgtgaccgagggaatgagaaagcccgccttcctgagcggcgagcagaaaaaggccatcgtggacctgctgttcaagaccaaccggaaagtgaccgtgaagcagctgaaagaggactacttcaagaaaatcgagtgcttcgactccgtggaaatctccggcgtggaagatcggttcaacgcctccctgggcacataccacgatctgctgaaaattatcaaggacaaggacttcctggacaatgaggaaaacgaggacattctggaagatatcgtgctgaccctgacactgtttgaggacagagagatgatcgaggaacggctgaaaacctatgcccacctgttcgacgacaaagtgatgaagcagctgaagcggcggagatacaccggctggggcaggctgagccggaagctgatcaacggcatccgggacaagcagtccggcaagacaatcctggatttcctgaagtccgacggcttcgccaacagaaacttcatgcagctgatccacgacgacagcctgacctttaaagaggacatccagaaagcccaggtgtccggccagggcgatagcctgcacgagcacattgccaatctggccggcagccccgccattaagaagggcatcctgcagacagtgaaggtggtggacgagctcgtgaaagtgatgggccggcacaagcccgagaacatcgtgatcgaaatggccagagagaaccagaccacccagaagggacagaagaacagccgcgagagaatgaagcggatcgaagagggcatcaaagagctgggcagccagatcctgaaagaacaccccgtggaaaacacccagctgcagaacgagaagctgtacctgtactacctgcagaatgggcgggatatgtacgtggaccaggaactggacatcaaccggctgtccgactacgatgtggaccatatcgtgcctcagagctttctgaaggacgactccatcgacaacaaggtgctgaccagaagcgacaagaaccggggcaagagcgacaacgtgccctccgaagaggtcgtgaagaagatgaagaactactggcggcagctgctgaacgccaagctgattacccagagaaagttcgacaatctgaccaaggccgagagaggcggcctgagcgaactggataaggccggcttcatcaagagacagctggtggaaacccggcagatcacaaagcacgtggcacagatcctggactcccggatgaacactaagtacgacgagaatgacaagctgatccgggaagtgaaagtgatcaccctgaagtccaagctggtgtccgatttccggaaggatttccagttttacaaagtgcgcgagatcaacaactaccaccacgcccacgacgcctacctgaacgccgtcgtgggaaccgccctgatcaaaaagtaccctaagctggaaagcgagttcgtgtacggcgactacaaggtgtacgacgtgcggaagatgatcgccaagagcgagcaggaaatcggcaaggctaccgccaagtacttcttctacagcaacatcatgaactttttcaagaccgagattaccctggccaacggcgagatccggaagcggcctctgatcgagacaaacggcgaaaccggggagatcgtgtgggataagggccgggattttgccaccgtgcggaaagtgctgagcatgccccaagtgaatatcgtgaaaaagaccgaggtgcagacaggcggcttcagcaaagagtctatcctgcccaagaggaacagcgataagctgatcgccagaaagaaggactgggaccctaagaagtacggcggcttcgacagccccaccgtggcctattctgtgctggtggtggccaaagtggaaaagggcaagtccaagaaactgaagagtgtgaaagagctgctggggatcaccatcatggaaagaagcagcttcgagaagaatcccatcgactttctggaagccaagggctacaaagaagtgaaaaaggacctgatcatcaagctgcctaagtactccctgttcgagctggaaaacggccggaagagaatgctggcctctgccggcgaactgcagaagggaaacgaactggccctgccctccaaatatgtgaacttcctgtacctggccagccactatgagaagctgaagggctcccccgaggataatgagcagaaacagctgtttgtggaacagcacaagcactacctggacgagatcatcgagcagatcagcgagttctccaagagagtgatcctggccgacgctaatctggacaaagtgctgtccgcctacaacaagcaccgggataagcccatcagagagcaggccgagaatatcatccacctgtttaccctgaccaatctgggagcccctgccgccttcaagtactttgacaccaccatcgaccggaagaggtacaccagcaccaaagaggtgctggacgccaccctgatccaccagagcatcaccggcctgtacgagacacggatcgacctgtctcagctgggaggtgac

SEQ ID NO: 61 - DNA, 4101 bp, Artificial sequence
  Synthetic polynucleotide
gacaagaagtacagcatcggcctggacatcggcaccaactctgtgggctgggccgtgatcaccgacgagtacaaggtgcccagcaagaaattcaaggtgctgggcaacaccgaccggcacagcatcaagaagaacctgatcggagccctgctgttcgacagcggcgaaacagccgaggccacccggctgaagagaaccgccagaagaagatacaccagacggaagaaccggatctgctatctgcaagagatcttcagcaacgagatggccaaggtggacgacagcttcttccacagactggaagagtccttcctggtggaagaggataagaagcacgagcggcaccccatcttcggcaacatcgtggacgaggtggcctaccacgagaagtaccccaccatctaccacctgagaaagaaactggtggacagcaccgacaaggccgacctgcggctgatctatctggccctggcccacatgatcaagttccggggccacttcctgatcgagggcgacctgaaccccgacaacagcgacgtggacaagctgttcatccagctggtgcagacctacaaccagctgttcgaggaaaaccccatcaacgccagcggcgtggacgccaaggccatcctgtctgccagactgagcaagagcagacggctggaaaatctgatcgcccagctgcccggcgagaagaagaatggcctgttcggaaacctgattgccctgagcctgggcctgacccccaacttcaagagcaacttcgacctggccgaggatgccaaactgcagctgagcaaggacacctacgacgacgacctggacaacctgctggcccagatcggcgaccagtacgccgacctgtttctggccgccaagaacctgtccgacgccatcctgctgagcgacatcctgagagtgaacaccgagatcaccaaggcccccctgagcgcctctatgatcaagagatacgacgagcaccaccaggacctgaccctgctgaaagctctcgtgcggcagcagctgcctgagaagtacaaagagattttcttcgaccagagcaagaacggctacgccggctacattgacggcggagccagccaggaagagttctacaagttcatcaagcccatcctggaaaagatggacggcaccgaggaactgctcgtgaagctgaacagagaggacctgctgcggaagcagcggaccttcgacaacggcagcatcccccaccagatccacctgggagagctgcacgccattctgcggcggcaggaagatttttacccattcctgaaggacaaccgggaaaagatcgagaagatcctgaccttccgcatcccctactacgtgggccctctggccaggggaaacagcagattcgcctggatgaccagaaagagcgaggaaaccatcaccccctggaacttcgaggaagtggtggacaagggcgcttccgcccagagcttcatcgagcggatgaccaacttcgataagaacctgcccaacgagaaggtgctgcccaagcacagcctgctgtacgagtacttcaccgtgtataacgagctgaccaaagtgaaatacgtgaccgagggaatgagaaagcccgccttcctgagcggcgagcagaaaaaggccatcgtggacctgctgttcaagaccaaccggaaagtgaccgtgaagcagctgaaagaggactacttcaagaaaatcgagtgcttcgactccgtggaaatctccggcgtggaagatcggttcaacgcctccctgggcacataccacgatctgctgaaaattatcaaggacaaggacttcctggacaatgaggaaaacgaggacattctggaagatatcgtgctgaccctgacactgtttgaggacagagagatgatcgaggaacggctgaaaacctatgcccacctgttcgacgacaaagtgatgaagcagctgaagcggcggagatacaccggctggggcaggctgagccggaagctgatcaacggcatccgggacaagcagtccggcaagacaatcctggatttcctgaagtccgacggcttcgccaacagaaacttcatgcagctgatccacgacgacagcctgacctttaaagaggacatccagaaagcccaggtgtccggccagggcgatagcctgcacgagcacattgccaatctggccggcagccccgccattaagaagggcatcctgcagacagtgaaggtggtggacgagctcgtgaaagtgatgggccggcacaagcccgagaacatcgtgatcgaaatggccagagagaaccagaccacccagaagggacagaagaacagccgcgagagaatgaagcggatcgaagagggcatcaaagagctgggcagccagatcctgaaagaacaccccgtggaaaacacccagctgcagaacgagaagctgtacctgtactacctgcagaatgggcgggatatgtacgtggaccaggaactggacatcaaccggctgtccgactacgatgtggaccatatcgtgcctcagagctttctggccgacgactccatcgacaacaaggtgctgaccagaagcgacaagaaccggggcaagagcgacaacgtgccctccgaagaggtcgtgaagaagatgaagaactactggcggcagctgctgaacgccaagctgattacccagagaaagttcgacaatctgaccaaggccgagagaggcggcctgagcgaactggataaggccggcttcatcaagagacagctggtggaaacccggcagatcacaaagcacgtggcacagatcctggactcccggatgaacactaagtacgacgagaatgacaagctgatccgggaagtgaaagtgatcaccctgaagtccaagctggtgtccgatttccggaaggatttccagttttacaaagtgcgcgagatcaacaactaccaccacgcccacgacgcctacctgaacgccgtcgtgggaaccgccctgatcaaaaagtaccctgccctggaaagcgagttcgtgtacggcgactacaaggtgtacgacgtgcggaagatgatcgccaagagcgagcaggaaatcggcaaggctaccgccaagtacttcttctacagcaacatcatgaactttttcaagaccgagattaccctggccaacggcgagatccggaaggcccctctgatcgagacaaacggcgaaaccggggagatcgtgtgggataagggccgggattttgccaccgtgcggaaagtgctgagcatgccccaagtgaatatcgtgaaaaagaccgaggtgcagacaggcggcttcagcaaagagtctatcctgcccaagaggaacagcgataagctgatcgccagaaagaaggactgggaccctaagaagtacggcggcttcgacagccccaccgtggcctattctgtgctggtggtggccaaagtggaaaagggcaagtccaagaaactgaagagtgtgaaagagctgctggggatcaccatcatggaaagaagcagcttcgagaagaatcccatcgactttctggaagccaagggctacaaagaagtgaaaaaggacctgatcatcaagctgcctaagtactccctgttcgagctggaaaacggccggaagagaatgctggcctctgccggcgaactgcagaagggaaacgaactggccctgccctccaaatatgtgaacttcctgtacctggccagccactatgagaagctgaagggctcccccgaggataatgagcagaaacagctgtttgtggaacagcacaagcactacctggacgagatcatcgagcagatcagcgagttctccaagagagtgatcctggccgacgctaatctggacaaagtgctgtccgcctacaacaagcaccgggataagcccatcagagagcaggccgagaatatcatccacctgtttaccctgaccaatctgggagcccctgccgccttcaagtactttgacaccaccatcgaccggaagaggtacaccagcaccaaagaggtgctggacgccaccctgatccaccagagcatcaccggcctgtacgagacacggatcgacctgtctcagctgggaggtgac

SEQ ID NO: 62 - DNA, 4101 bp, Artificial sequence
  Synthetic polynucleotide
gacaagaagtacagcatcggcctggccatcggcaccaactctgtgggctgggccgtgatcaccgacgagtacaaggtgcccagcaagaaattcaaggtgctgggcaacaccgaccggcacagcatcaagaagaacctgatcggagccctgctgttcgacagcggcgaaacagccgaggccacccggctgaagagaaccgccagaagaagatacaccagacggaagaaccggatctgctatctgcaagagatcttcagcaacgagatggccaaggtggacgacagcttcttccacagactggaagagtccttcctggtggaagaggataagaagcacgagcggcaccccatcttcggcaacatcgtggacgaggtggcctaccacgagaagtaccccaccatctaccacctgagaaagaaactggtggacagcaccgacaaggccgacctgcggctgatctatctggccctggcccacatgatcaagttccggggccacttcctgatcgagggcgacctgaaccccgacaacagcgacgtggacaagctgttcatccagctggtgcagacctacaaccagctgttcgaggaaaaccccatcaacgccagcggcgtggacgccaaggccatcctgtctgccagactgagcaagagcagacggctggaaaatctgatcgcccagctgcccggcgagaagaagaatggcctgttcggaaacctgattgccctgagcctgggcctgacccccaacttcaagagcaacttcgacctggccgaggatgccaaactgcagctgagcaaggacacctacgacgacgacctggacaacctgctggcccagatcggcgaccagtacgccgacctgtttctggccgccaagaacctgtccgacgccatcctgctgagcgacatcctgagagtgaacaccgagatcaccaaggcccccctgagcgcctctatgatcaagagatacgacgagcaccaccaggacctgaccctgctgaaagctctcgtgcggcagcagctgcctgagaagtacaaagagattttcttcgaccagagcaagaacggctacgccggctacattgacggcggagccagccaggaagagttctacaagttcatcaagcccatcctggaaaagatggacggcaccgaggaactgctcgtgaagctgaacagagaggacctgctgcggaagcagcggaccttcgacaacggcagcatcccccaccagatccacctgggagagctgcacgccattctgcggcggcaggaagatttttacccattcctgaaggacaaccgggaaaagatcgagaagatcctgaccttccgcatcccctactacgtgggccctctggccaggggaaacagcagattcgcctggatgaccagaaagagcgaggaaaccatcaccccctggaacttcgaggaagtggtggacaagggcgcttccgcccagagcttcatcgagcggatgaccaacttcgataagaacctgcccaacgagaaggtgctgcccaagcacagcctgctgtacgagtacttcaccgtgtataacgagctgaccaaagtgaaatacgtgaccgagggaatgagaaagcccgccttcctgagcggcgagcagaaaaaggccatcgtggacctgctgttcaagaccaaccggaaagtgaccgtgaagcagctgaaagaggactacttcaagaaaatcgagtgcttcgactccgtggaaatctccggcgtggaagatcggttcaacgcctccctgggcacataccacgatctgctgaaaattatcaaggacaaggacttcctggacaatgaggaaaacgaggacattctggaagatatcgtgctgaccctgacactgtttgaggacagagagatgatcgaggaacggctgaaaacctatgcccacctgttcgacgacaaagtgatgaagcagctgaagcggcggagatacaccggctggggcaggctgagccggaagctgatcaacggcatccgggacaagcagtccggcaagacaatcctggatttcctgaagtccgacggcttcgccaacagaaacttcatgcagctgatccacgacgacagcctgacctttaaagaggacatccagaaagcccaggtgtccggccagggcgatagcctgcacgagcacattgccaatctggccggcagccccgccattaagaagggcatcctgcagacagtgaaggtggtggacgagctcgtgaaagtgatgggccggcacaagcccgagaacatcgtgatcgaaatggccagagagaaccagaccacccagaagggacagaagaacagccgcgagagaatgaagcggatcgaagagggcatcaaagagctgggcagccagatcctgaaagaacaccccgtggaaaacacccagctgcagaacgagaagctgtacctgtactacctgcagaatgggcgggatatgtacgtggaccaggaactggacatcaaccggctgtccgactacgatgtggaccatatcgtgcctcagagctttctgaaggacgactccatcgacaacaaggtgctgaccagaagcgacaagaaccggggcaagagcgacaacgtgccctccgaagaggtcgtgaagaagatgaagaactactggcggcagctgctgaacgccaagctgattacccagagaaagttcgacaatctgaccaaggccgagagaggcggcctgagcgaactggataaggccggcttcatcaagagacagctggtggaaacccggcagatcacaaagcacgtggcacagatcctggactcccggatgaacactaagtacgacgagaatgacaagctgatccgggaagtgaaagtgatcaccctgaagtccaagctggtgtccgatttccggaaggatttccagttttacaaagtgcgcgagatcaacaactaccaccacgcccacgacgcctacctgaacgccgtcgtgggaaccgccctgatcaaaaagtaccctaagctggaaagcgagttcgtgtacggcgactacaaggtgtacgacgtgcggaagatgatcgccaagagcgagcaggaaatcggcaaggctaccgccaagtacttcttctacagcaacatcatgaactttttcaagaccgagattaccctggccaacggcgagatccggaagcggcctctgatcgagacaaacggcgaaaccggggagatcgtgtgggataagggccgggattttgccaccgtgcggaaagtgctgagcatgccccaagtgaatatcgtgaaaaagaccgaggtgcagacaggcggcttcagcaaagagtctatcctgcccaagaggaacagcgataagctgatcgccagaaagaaggactgggaccctaagaagtacggcggcttcgacagccccaccgtggcctattctgtgctggtggtggccaaagtggaaaagggcaagtccaagaaactgaagagtgtgaaagagctgctggggatcaccatcatggaaagaagcagcttcgagaagaatcccatcgactttctggaagccaagggctacaaagaagtgaaaaaggacctgatcatcaagctgcctaagtactccctgttcgagctggaaaacggccggaagagaatgctggcctctgccggcgaactgcagaagggaaacgaactggccctgccctccaaatatgtgaacttcctgtacctggccagccactatgagaagctgaagggctcccccgaggataatgagcagaaacagctgtttgtggaacagcacaagcactacctggacgagatcatcgagcagatcagcgagttctccaagagagtgatcctggccgacgctaatctggacaaagtgctgtccgcctacaacaagcaccgggataagcccatcagagagcaggccgagaatatcatccacctgtttaccctgaccaatctgggagcccctgccgccttcaagtactttgacaccaccatcgaccggaagaggtacaccagcaccaaagaggtgctggacgccaccctgatccaccagagcatcaccggcctgtacgagacacggatcgacctgtctcagctgggaggtgac

SEQ ID NO: 63 - DNA, 4101 bp, Artificial sequence
  Synthetic polynucleotide
gacaagaagtacagcatcggcctggacatcggcaccaactctgtgggctgggccgtgatcaccgacgagtacaaggtgcccagcaagaaattcaaggtgctgggcaacaccgaccggcacagcatcaagaagaacctgatcggagccctgctgttcgacagcggcgaaacagccgaggccacccggctgaagagaaccgccagaagaagatacaccagacggaagaaccggatctgctatctgcaagagatcttcagcaacgagatggccaaggtggacgacagcttcttccacagactggaagagtccttcctggtggaagaggataagaagcacgagcggcaccccatcttcggcaacatcgtggacgaggtggcctaccacgagaagtaccccaccatctaccacctgagaaagaaactggtggacagcaccgacaaggccgacctgcggctgatctatctggccctggcccacatgatcaagttccggggccacttcctgatcgagggcgacctgaaccccgacaacagcgacgtggacaagctgttcatccagctggtgcagacctacaaccagctgttcgaggaaaaccccatcaacgccagcggcgtggacgccaaggccatcctgtctgccagactgagcaagagcagacggctggaaaatctgatcgcccagctgcccggcgagaagaagaatggcctgttcggaaacctgattgccctgagcctgggcctgacccccaacttcaagagcaacttcgacctggccgaggatgccaaactgcagctgagcaaggacacctacgacgacgacctggacaacctgctggcccagatcggcgaccagtacgccgacctgtttctggccgccaagaacctgtccgacgccatcctgctgagcgacatcctgagagtgaacaccgagatcaccaaggcccccctgagcgcctctatgatcaagagatacgacgagcaccaccaggacctgaccctgctgaaagctctcgtgcggcagcagctgcctgagaagtacaaagagattttcttcgaccagagcaagaacggctacgccggctacattgacggcggagccagccaggaagagttctacaagttcatcaagcccatcctggaaaagatggacggcaccgaggaactgctcgtgaagctgaacagagaggacctgctgcggaagcagcggaccttcgacaacggcagcatcccccaccagatccacctgggagagctgcacgccattctgcggcggcaggaagatttttacccattcctgaaggacaaccgggaaaagatcgagaagatcctgaccttccgcatcccctactacgtgggccctctggccaggggaaacagcagattcgcctggatgaccagaaagagcgaggaaaccatcaccccctggaacttcgaggaagtggtggacaagggcgcttccgcccagagcttcatcgagcggatgaccaacttcgataagaacctgcccaacgagaaggtgctgcccaagcacagcctgctgtacgagtacttcaccgtgtataacgagctgaccaaagtgaaatacgtgaccgagggaatgagaaagcccgccttcctgagcggcgagcagaaaaaggccatcgtggacctgctgttcaagaccaaccggaaagtgaccgtgaagcagctgaaagaggactacttcaagaaaatcgagtgcttcgactccgtggaaatctccggcgtggaagatcggttcaacgcctccctgggcacataccacgatctgctgaaaattatcaaggacaaggacttcctggacaatgaggaaaacgaggacattctggaagatatcgtgctgaccctgacactgtttgaggacagagagatgatcgaggaacggctgaaaacctatgcccacctgttcgacgacaaagtgatgaagcagctgaagcggcggagatacaccggctggggcaggctgagccggaagctgatcaacggcatccgggacaagcagtccggcaagacaatcctggatttcctgaagtccgacggcttcgccaacagaaacttcatgcagctgatccacgacgacagcctgacctttaaagaggacatccagaaagcccaggtgtccggccagggcgatagcctgcacgagcacattgccaatctggccggcagccccgccattaagaagggcatcctgcagacagtgaaggtggtggacgagctcgtgaaagtgatgggccggcacaagcccgagaacatcgtgatcgaaatggccagagagaaccagaccacccagaagggacagaagaacagccgcgagagaatgaagcggatcgaagagggcatcaaagagctgggcagccagatcctgaaagaacaccccgtggaaaacacccagctgcagaacgagaagctgtacctgtactacctgcagaatgggcgggatatgtacgtggaccaggaactggacatcaaccggctgtccgactacgatgtggacgccatcgtgcctcagagctttctgaaggacgactccatcgacaacaaggtgctgaccagaagcgacaagaaccggggcaagagcgacaacgtgccctccgaagaggtcgtgaagaagatgaagaactactggcggcagctgctgaacgccaagctgattacccagagaaagttcgacaatctgaccaaggccgagagaggcggcctgagcgaactggataaggccggcttcatcaagagacagctggtggaaacccggcagatcacaaagcacgtggcacagatcctggactcccggatgaacactaagtacgacgagaatgacaagctgatccgggaagtgaaagtgatcaccctgaagtccaagctggtgtccgatttccggaaggatttccagttttacaaagtgcgcgagatcaacaactaccaccacgcccacgacgcctacctgaacgccgtcgtgggaaccgccctgatcaaaaagtaccctaagctggaaagcgagttcgtgtacggcgactacaaggtgtacgacgtgcggaagatgatcgccaagagcgagcaggaaatcggcaaggctaccgccaagtacttcttctacagcaacatcatgaactttttcaagaccgagattaccctggccaacggcgagatccggaagcggcctctgatcgagacaaacggcgaaaccggggagatcgtgtgggataagggccgggattttgccaccgtgcggaaagtgctgagcatgccccaagtgaatatcgtgaaaaagaccgaggtgcagacaggcggcttcagcaaagagtctatcctgcccaagaggaacagcgataagctgatcgccagaaagaaggactgggaccctaagaagtacggcggcttcgacagccccaccgtggcctattctgtgctggtggtggccaaagtggaaaagggcaagtccaagaaactgaagagtgtgaaagagctgctggggatcaccatcatggaaagaagcagcttcgagaagaatcccatcgactttctggaagccaagggctacaaagaagtgaaaaaggacctgatcatcaagctgcctaagtactccctgttcgagctggaaaacggccggaagagaatgctggcctctgccggcgaactgcagaagggaaacgaactggccctgccctccaaatatgtgaacttcctgtacctggccagccactatgagaagctgaagggctcccccgaggataatgagcagaaacagctgtttgtggaacagcacaagcactacctggacgagatcatcgagcagatcagcgagttctccaagagagtgatcctggccgacgctaatctggacaaagtgctgtccgcctacaacaagcaccgggataagcccatcagagagcaggccgagaatatcatccacctgtttaccctgaccaatctgggagcccctgccgccttcaagtactttgacaccaccatcgaccggaagaggtacaccagcaccaaagaggtgctggacgccaccctgatccaccagagcatcaccggcctgtacgagacacggatcgacctgtctcagctgggaggtgac

SEQ ID NO: 64 - DNA, 4917 bp, Artificial sequence
  Synthetic Ri plasmid
tggacccggagcacgccagcccactgatcttgcttgacagagtcaaaattcgcgtaggagagggatggctcaatcaacaggttcttgaccgggctccatttgacattcgtgcttgcggcgaagatcttggtgtcggaataggcaagctggaggttccacttcagcttgtcgttgatcggaaccccaacgccgccccagacagcccaatcgcccatgccgcaaagatcgccacggccagtcgggcaagcggtagtgtcgagattcgagccggcatactggttcagcttcttgccgtccgtgttccaggcacccatcaagaaggctgtgaaggcgccgaagtcagcatcgacacgagccttgatagcgccttcttcggcaatcgagtcgtaaccaccgacaaccttgaatccgaagttgccaactctgtaaccagcaccggcaacaacattcggagcgtagtggttagctttcgccttaacccaggcaccgccgtaggtagatgaatccgagccggaattggagtcttcgagtgagaccacggccgcgaagccgttgcctgcgtcgtagttgtaggtcaactggttgagttcggacgggccgtagtagatctcgtcatcgtagaaaacgtcgccggcgtaaccggtgtagaagtcgtaggccgagtccttcttgccgagagtgaagccaccaagattgatgtaggaccacactaggttggtggcagtagcaccgccgtcgttccagtcccaacgaacaatggcttcggtctgtagcggaccgtattcggtatcgcttgcggtgtcgagctgaaggtgcgcacgggtgtgccatttggtgccgagggcagcggtcggactgtagccattgtgccagacaccttccgaccgaacatagccgctaatcttaaggcaggtctcgctgcccgggatgaagaagtagccagctccataggcatcacagatgcggacatattcaagcggctccggttgggcagcaacgactgcatcagcagcatgcacgctcgaaacggcaccgaatgccgtagctgaactcaataatagctttgtaagcttcacgtgaatttaccccctagaaatgtggaaaagcgttagcaattccgctgaacaaaataagttgaacagcttcaagcggagggaaactcacgaaagggacgctactgtgcaagtgatgaatagaaatcaatcgccgtagacgatacgttatttacggatcaagccgctctatacacgagctcgatttaatatcggcgaaactgccacaccaaccgcatgattgttacctacacgtcacacaacttgtacctaattagcgggcgtataataaggttgatctatagtctgtggtcggtttgggtctgatccaaagatcattcagcaacgagagtgcgcgagtgacgaaccaccaatcactgtgaagctcgggcgagcgcattttgatcttggatggatccatccgacgaaggccgcaggatttcgttcgtcgtgcgtgatgagatcgataaatgtttatcgacgaggacaagatcgacgatgcggttcttgcgctgttgtagtgacgctccacaacgagtgttgcgccgtgaaaggctttgactgggccgcgacggaccgcctttgcaggaagggttcggtcggcgatcccgtcaataaatcgaagctattgatcctgacggataaaggtctgcgtcgatcggaggagctattccgacagctgtttacgcgctagccattggccgacggtctttgcgccctccattcccacggcgtagttaatgccggcggggacgggagtgtctactatgtgcaagcacgtcggcgaaccatgccttcggattaatgtcgttcagacgggcggtcgtaagttgaatgagtatgactgccgcatggtcagcgccgcgttgggagccggcagatgtccagtcgcggcgcctcaaggccatcacatgttcactctgtggccagaaggcgtcgctccttgggccatgggaagttcctatactttctagagaataggaacttcggaataggaacttcacgcacaccgtggaaacggatgaaggcacgaacccagttgacataagcctgttcggttcgtaaactgtaatgcaagtagcgtatgcgctcacgcaactggtccagaaccttgaccgaacgcagcggtggtaacggcgcagtggcggttttcatggcttgttatgactgtttttttgtacagtctatgcctcgggcatccaagcagcaagcgcgttacgccgtgggtcgatgtttgatgttatggagcagcaacgatgctgcgcagcagcaatgatgtgacgcagcagggctcgcgcccgaaaacgaagctgggcggctcatcgatgggcatcattcgcacatgcaggctgggccctgaccaggtcaaatcgatgcgggcagctcttgatctgttcggtcgtgagttcggagacgtcgccacctattcccaacatcagccggactccgattatctcgggaacctgttgcgtagcaagactttcatcgcgcttgccgccttcgaccaggaagcggttgtcggcgccctcgcggcctacgttctgcccaagtttgagcagccgcgatctgagatctatatctatgatctcgcggtctccggcgagcaccggcgccagggcattgccaccgcgctgatcaatctcctgaagcatgaagccaacgcgcttggtgcttatgtcatctacgtgcaagcagattacggtgacgatcccgcagtggccctctatacgaagttgggcatacgcgaagaagtgatgcactttgatatcgacccgagtaccgccacctgacaattcgttcaagccgagatcggcttcccggccggaagttcctatactttctagagaataggaacttcggtcgactagataaatttgtgtggaggtatgtttgtttaggacggcggtgatgatggcttgcgccttacgtcccgaaagcagtccacgaagacaattgcaatatcggctgtcttccattcccttcgtggcatcttgtcaacgcgcctcgggagctcagtcgccgacgtttcgcgagttcggtatgcaaccccgaccttgcgaagaaccgcttacggaaccgcgctctatgagaaccgccgggagaagagtttccttgggtggggctgaagtctcgccctttaagcgggcgatcaggtcttctgtggcagccgtcgcgagatccctgacaggttgcgaaatcacggtcaatggcggcgttatagcggatgtccagtcggcgtcgtcaaagcagataagagagacatcatcgggaatcgaaagatccatttcccgaagaactccaaggagaacgagggctacggagctgtctgtggccaaaaaagcggtaggtctgttcggggaaatgcagagcgcacgcacctggtcggcgagattttttgtgtcccagccgccgagaacgataaggttaggagaaatctttatttgggcatcgtgcagcgcggcccgataaccatcgatacgttcccgaacggacgaaatcaggtactgctgctccccttgggcgggggcgttagacactaaggcaatactacgatggcctcgcccagtgagcgacgttaccgcctcgtgggctgcacggaaattgtcgaccgcaaaagtgttggcgtgaagaacagggacccgcctgtcaagaaggaccactgggcagcctctctccgatgcgctaatgagatgctccacctcgctgcttgacgttggagagattatcaatccatcgactcgcttagccagaagaacgcgaacagcgtcccgctccagctcgatatcctcatcggtcgtcgctaggatcacgacgaaaccgtgcgcaccggcggtgtccgtaatagcccgaatagcccgcgcaaaatagagattctcaatgtccgctataaccacaccgatcgttttgctacggccggtcgccatgctctgcgcgagatgattgggcctgtaagccaagctcttcgcggcatccgcaacgagttcgcgcgtcttttcgcggacatagccgtaaccgccaagtacccttgcagcggttgcccttgagacgcccgcaacgcgtgcaacgtcggcgattgtcggagcagcgcccgcgcgatcgttgtctttcatgagctgctcgttcccaaagggaggttcttggcgggtgccattttcgagttccttgtcttcctgcacgaaatagctagctcccctcccgcggacctctgcctcagcactattctgttccggttccgccctatgacgccctaatctgtctcgatcaatcgcgcggcagaaggccggcgtttagcgccggccagatacaacgctcctaccgcaagtgcggagcgagcaattctaagtcggcttcactcagcctatcgctcgcgttattacgctggtgccaatacggataaagcaacggtggaatgctgacgtcgtcgagccgctttcgttcttcttccgatagtttcaattctgcggcggccagattatccttgaactgggcctcggttcgcccgccgataatgacggaggtgacgaccttgcggccaattaaccaggctagcgccacctgagctgcggagacgcctcggccttcggcaatcgacactagtgtatcaacgatcttccacaggcggttttcgtcgcgaatcggcggctctttccagccggcaaactggcggctaccttccggcgccgactggttgcgccgatgtttgccagaaagcagaccgcccgcgagcgggctccagacgagtacgccgaggccttggtctacggaaatcggtagcagctcatattcggcatcgcgagcttcgagggtatagtggatctgctgactaacaaagcgctggcgcttatctttctcactgactgcgagt

SEQ ID NO: 65 - DNA, 2000 bp, Agrobacterium rhizogenes
tggacccggagcacgccagcccactgatcttgcttgacagagtcaaaattcgcgtaggagagggatggctcaatcaacaggttcttgaccgggctccatttgacattcgtgcttgcggcgaagatcttggtgtcggaataggcaagctggaggttccacttcagcttgtcgttgatcggaaccccaacgccgccccagacagcccaatcgcccatgccgcaaagatcgccacggccagtcgggcaagcggtagtgtcgagattcgagccggcatactggttcagcttcttgccgtccgtgttccaggcacccatcaagaaggctgtgaaggcgccgaagtcagcatcgacacgagccttgatagcgccttcttcggcaatcgagtcgtaaccaccgacaaccttgaatccgaagttgccaactctgtaaccagcaccggcaacaacattcggagcgtagtggttagctttcgccttaacccaggcaccgccgtaggtagatgaatccgagccggaattggagtcttcgagtgagaccacggccgcgaagccgttgcctgcgtcgtagttgtaggtcaactggttgagttcggacgggccgtagtagatctcgtcatcgtagaaaacgtcgccggcgtaaccggtgtagaagtcgtaggccgagtccttcttgccgagagtgaagccaccaagattgatgtaggaccacactaggttggtggcagtagcaccgccgtcgttccagtcccaacgaacaatggcttcggtctgtagcggaccgtattcggtatcgcttgcggtgtcgagctgaaggtgcgcacgggtgtgccatttggtgccgagggcagcggtcggactgtagccattgtgccagacaccttccgaccgaacatagccgctaatcttaaggcaggtctcgctgcccgggatgaagaagtagccagctccataggcatcacagatgcggacatattcaagcggctccggttgggcagcaacgactgcatcagcagcatgcacgctcgaaacggcaccgaatgccgtagctgaactcaataatagctttgtaagcttcacgtgaatttaccccctagaaatgtggaaaagcgttagcaattccgctgaacaaaataagttgaacagcttcaagcggagggaaactcacgaaagggacgctactgtgcaagtgatgaatagaaatcaatcgccgtagacgatacgttatttacggatcaagccgctctatacacgagctcgatttaatatcggcgaaactgccacaccaaccgcatgattgttacctacacgtcacacaacttgtacctaattagcgggcgtataataaggttgatctatagtctgtggtcggtttgggtctgatccaaagatcattcagcaacgagagtgcgcgagtgacgaaccaccaatcactgtgaagctcgggcgagcgcattttgatcttggatggatccatccgacgaaggccgcaggatttcgttcgtcgtgcgtgatgagatcgataaatgtttatcgacgaggacaagatcgacgatgcggttcttgcgctgttgtagtgacgctccacaacgagtgttgcgccgtgaaaggctttgactgggccgcgacggaccgcctttgcaggaagggttcggtcggcgatcccgtcaataaatcgaagctattgatcctgacggataaaggtctgcgtcgatcggaggagctattccgacagctgtttacgcgctagccattggccgacggtctttgcgccctccattcccacggcgtagttaatgccggcggggacgggagtgtctactatgtgcaagcacgtcggcgaaccatgccttcggattaatgtcgttcagacgggcggtcgtaagttgaatgagtatgactgccgcatggtcagcgccgcgttgggagccggcagatgtccagtcgcggcgcctcaaggccatcacatgttcactctgtggccagaaggcgtcgctccttggg

SEQ ID NO: 66 - DNA, 2000 bp, Agrobacterium rhizogenes
tagataaatttgtgtggaggtatgtttgtttaggacggcggtgatgatggcttgcgccttacgtcccgaaagcagtccacgaagacaattgcaatatcggctgtcttccattcccttcgtggcatcttgtcaacgcgcctcgggagctcagtcgccgacgtttcgcgagttcggtatgcaaccccgaccttgcgaagaaccgcttacggaaccgcgctctatgagaaccgccgggagaagagtttccttgggtggggctgaagtctcgccctttaagcgggcgatcaggtcttctgtggcagccgtcgcgagatccctgacaggttgcgaaatcacggtcaatggcggcgttatagcggatgtccagtcggcgtcgtcaaagcagataagagagacatcatcgggaatcgaaagatccatttcccgaagaactccaaggagaacgagggctacggagctgtctgtggccaaaaaagcggtaggtctgttcggggaaatgcagagcgcacgcacctggtcggcgagattttttgtgtcccagccgccgagaacgataaggttaggagaaatctttatttgggcatcgtgcagcgcggcccgataaccatcgatacgttcccgaacggacgaaatcaggtactgctgctccccttgggcgggggcgttagacactaaggcaatactacgatggcctcgcccagtgagcgacgttaccgcctcgtgggctgcacggaaattgtcgaccgcaaaagtgttggcgtgaagaacagggacccgcctgtcaagaaggaccactgggcagcctctctccgatgcgctaatgagatgctccacctcgctgcttgacgttggagagattatcaatccatcgactcgcttagccagaagaacgcgaacagcgtcccgctccagctcgatatcctcatcggtcgtcgctaggatcacgacgaaaccgtgcgcaccggcggtgtccgtaatagcccgaatagcccgcgcaaaatagagattctcaatgtccgctataaccacaccgatcgttttgctacggccggtcgccatgctctgcgcgagatgattgggcctgtaagccaagctcttcgcggcatccgcaacgagttcgcgcgtcttttcgcggacatagccgtaaccgccaagtacccttgcagcggttgcccttgagacgcccgcaacgcgtgcaacgtcggcgattgtcggagcagcgcccgcgcgatcgttgtctttcatgagctgctcgttcccaaagggaggttcttggcgggtgccattttcgagttccttgtcttcctgcacgaaatagctagctcccctcccgcggacctctgcctcagcactattctgttccggttccgccctatgacgccctaatctgtctcgatcaatcgcgcggcagaaggccggcgtttagcgccggccagatacaacgctcctaccgcaagtgcggagcgagcaattctaagtcggcttcactcagcctatcgctcgcgttattacgctggtgccaatacggataaagcaacggtggaatgctgacgtcgtcgagccgctttcgttcttcttccgatagtttcaattctgcggcggccagattatccttgaactgggcctcggttcgcccgccgataatgacggaggtgacgaccttgcggccaattaaccaggctagcgccacctgagctgcggagacgcctcggccttcggcaatcgacactagtgtatcaacgatcttccacaggcggttttcgtcgcgaatcggcggctctttccagccggcaaactggcggctaccttccggcgccgactggttgcgccgatgtttgccagaaagcagaccgcccgcgagcgggctccagacgagtacgccgaggccttggtctacggaaatcggtagcagctcatattcggcatcgcgagcttcgagggtatagtggatctgctgactaacaaagcgctggcgcttatctttctcactgactgcgagt

SEQ ID NO: 67 - DNA, 55500 bp, Agrobacterium rhizogenes
tggacccggagcacgccagcccactgatcttgcttgacagagtcaaaattcgcgtaggagagggatggctcaatcaacaggttcttgaccgggctccatttgacattcgtgcttgcggcgaagatcttggtgtcggaataggcaagctggaggttccacttcagcttgtcgttgatcggaaccccaacgccgccccagacagcccaatcgcccatgccgcaaagatcgccacggccagtcgggcaagcggtagtgtcgagattcgagccggcatactggttcagcttcttgccgtccgtgttccaggcacccatcaagaaggctgtgaaggcgccgaagtcagcatcgacacgagccttgatagcgccttcttcggcaatcgagtcgtaaccaccgacaaccttgaatccgaagttgccaactctgtaaccagcaccggcaacaacattcggagcgtagtggttagctttcgccttaacccaggcaccgccgtaggtagatgaatccgagccggaattggagtcttcgagtgagaccacggccgcgaagccgttgcctgcgtcgtagttgtaggtcaactggttgagttcggacgggccgtagtagatctcgtcatcgtagaaaacgtcgccggcgtaaccggtgtagaagtcgtaggccgagtccttcttgccgagagtgaagccaccaagattgatgtaggaccacactaggttggtggcagtagcaccgccgtcgttccagtcccaacgaacaatggcttcggtctgtagcggaccgtattcggtatcgcttgcggtgtcgagctgaaggtgcgcacgggtgtgccatttggtgccgagggcagcggtcggactgtagccattgtgccagacaccttccgaccgaacatagccgctaatcttaaggcaggtctcgctgcccgggatgaagaagtagccagctccataggcatcacagatgcggacatattcaagcggctccggttgggcagcaacgactgcatcagcagcatgcacgctcgaaacggcaccgaatgccgtagctgaactcaataatagctttgtaagcttcacgtgaatttaccccctagaaatgtggaaaagcgttagcaattccgctgaacaaaataagttgaacagcttcaagcggagggaaactcacgaaagggacgctactgtgcaagtgatgaatagaaatcaatcgccgtagacgatacgttatttacggatcaagccgctctatacacgagctcgatttaatatcggcgaaactgccacaccaaccgcatgattgttacctacacgtcacacaacttgtacctaattagcgggcgtataataaggttgatctatagtctgtggtcggtttgggtctgatccaaagatcattcagcaacgagagtgcgcgagtgacgaaccaccaatcactgtgaagctcgggcgagcgcattttgatcttggatggatccatccgacgaaggccgcaggatttcgttcgtcgtgcgtgatgagatcgataaatgtttatcgacgaggacaagatcgacgatgcggttcttgcgctgttgtagtgacgctccacaacgagtgttgcgccgtgaaaggctttgactgggccgcgacggaccgcctttgcaggaagggttcggtcggcgatcccgtcaataaatcgaagctattgatcctgacggataaaggtctgcgtcgatcggaggagctattccgacagctgtttacgcgctagccattggccgacggtctttgcgccctccattcccacggcgtagttaatgccggcggggacgggagtgtctactatgtgcaagcacgtcggcgaaccatgccttcggattaatgtcgttcagacgggcggtcgtaagttgaatgagtatgactgccgcatggtcagcgccgcgttgggagccggcagatgtccagtcgcggcgcctcaaggccatcacatgttcactctgtggccagaaggcgtcgctccttgggtggcaggatatattgtgatgtaaacagattagatatggacatgcgaagtcgttttaacgcatgctttatcgaatataaaatgtagatgggctaatgtggttttacgtcatgtgaataaaagttcagcattcgtttaataatatttcaatatcggtgtctagagacccgtggatttgtatagtcagcaccatgatatgaatctataaaatattgtatctccaattgcaattcaatcgatataagaaattaatacaagccgttcatatagtaaggttgccaatggcattcaataacgaccgtacagttgccgctatattaatctacgtgccatttcttaaataaagataggcgaatgactatcgaaaataaaacaattattaatgagtgaaaacgtattgcacaaataaagattcattatggttggctcaaattttggctctggtgctcgatgacgtcgagatgaggacagtagtgatcaacttggcggtcgataccttggttacgccactcccagagtgccatgtcgtcctccgagcggtctgagataacccagtcggcaattgctgctgcattgccgggcgttccccaaccacgacgaatatgctttcgttcatctaactcgcgtcgcactgccctcccagtcatgaagtcaaagccaaattctaccctctctccatttcccagctcagtcgagaaatcgtaacacctcgtggcagctgacagtttcagaaaggggcgtatccctcgaactccagggtcctctttcacatagttagcaaggcgtactgctgcataatctgcgttgaaggctctgatgactacaggatcctcggacaagcccaattgatcagggcgaaccctcgcgctcataatatgaattgcgacgacccttgcttcctgtcggagcatcgaatcaatccaagccttccctgcggcatagaggtcatcgactgcgatgtcatcaagatcgagtagctttgccaacctaggaagttcttgaggaaaaatcaccggcatgacagcaaccgtctctcgccagtcagttgccggactggcttccctaacgccatccacgaatgcctcaccgcttgcgtatttgaatgtgtaaaagagaaggaccactctttggcggtacttcggacgccggcttagccacgcggcaataatgtgggcctcaaactcacgaccatccaaaaatatagtcgcgcctggattgacctcgctggccttgtcgagaagaggttccaaaaagggaacggtgtctttcgtaatagtacttaaatctgtgagttcgccatgcgaaacctctcgaacgattatcggcgtatccctgacatcagctgaatgaaattctcggacgagtttgtcgggcaaagtggagacccgccacgtgttgaagtcgtgggaaacgatgggcacatcgtcgccggtgagtgcggcatcgagctcagagaggttccgcctgccaacctcaccgagagcagtcaacaacgaagtttcggtgcattcctgtatccctttacccagattatacatgccccggtgttcgataacttgaagaggcagtggctcctcaagatgttcaaggaggtggggtacagagtgccgggcgaggacctcatccaccgtgacaccaaccgggagatcccattcgagtttccactggggccagcatgtgcccgcgacggcgaaaggtttgcgctggcaaagaacccggctgctgcaggtggacctatccttacccatggcaatggggttttgctaaaaagtcaggcactttactgggcaattgatagggtgggattgcgttattaactgttctccagcgggaatctttatctttattgaaatgctaaagcacttagataaaatacagctgtaccgcaatataaaatagtaggataatgtaatatgtgtatcgagaatacgacaagctaatataatctagcgtcaaattgcaataatttaaatcaaaactactgatgaaataataaaagatggtcaatttttattggtaggagttgtcgaaagattcgacggacggccattacaatacataggtgcaagaagtaaaacaggaagggaaacggaaaacagtgctataaaaaagcgacagatcgcggcgatcactgactgcgatcgggaagaagctcgccaagttcaccgagaatagcagagagcgcatcctcatcgggtactacgaacacattcgtcccagagggctttgtttcagctgcgccaacccagaaagcaaggccattttccaagttgccgatggcggtcagcatgtctcgatcgttgctgccgtttccacaagcgatgtgaaggccgatcccgtgagagaggcccttgacgaaggtgaaatagcctttggattttccaactgtttcaacgggcactagatattgaccctctggcgcggcaaccaccttgaatttgcgagatgactggttgccgatgagcgaagaaagcatttctccggcttctttgtaagatttgtgagattcccacatttgacagccgtagaaatgccccatcggaatgttgcggattcccgggatgccaccaaatttgttctccatagccgcgtgaacggcttgccagttgggcagggagaaagaatcgaagcgatcatctttgtagatcgtgaccattccatcatttccctggaatccgatattttcaatggcgctgaaaactgaccttgcgatttcttcgcattcccgtgcggatgtgagcaattgataatggcccttgcaggcgatcctggtcaaattggcgatgatgttgatggcaggattaatatcccaacactggtgatttcgatcttgcttaaaggtggtaccatcgccgtcgaaggcgagcagggcccggagagatgaatcggcaagactgcgtcggacccgctccgcggcgtcgggaatgaggctgataagagacatatccaaaggtgtttgtgggtaacgggctgctcaatgaagccttaaatgcaacgcaacatatgtaaggatgagttgacttattggagagagaaataggaatgagctggccagccattatcaacgtggggccatgctgacaatgtttacgtgaaaggctcaactacctcgaagcagacctctatattcgttgactttattactgaacaagaagttgcttgccactcattttcttaaatcttgccctttctgcgcctcgctatcatgcccgccaacgacgcgacatgcgctgccgcgattgccttccccgagggcaactggaaggaagaacttgatgcgctccgcaccttgtgtgaccccgtcgaggtggttaaggtcgcagtcggcagaggtcttagcggcatatgtaatgttgttgcagcaatgaatcccacaaaggtgaggggcctcggcgatgtcatcgggcagatgccggctcttaatcaccgtattgctgccgccgccggcgaaactccggtgcgagaccttggaataggttaccagtgcgcaatctgccaccccgacatagccagtgcgatgttagccacttctgaggggatcagccacgttctccgtgaaaggattgagaaagaagttgaccgggacattggagaaggcgccaccgtctgcattttcgttcagccgagaatgagctccaagggctctccagtttctgtccatttcaccctccagtttgcgagatctggaactcttgtcgatgccagaatgatggagagttacaatttcatgaaaggcaatggcacagtgaccgcaccggatttgaaaagtcattggaagaagcacggtattgacaggccaggcccacgtccgcccacgtccaagtttgaactcctcttcgccgctgtccccgacaacagtaaacttgccgccaccgattttacccatctcggccctgtcgagcgtgataaggaactactcggcagcacggtattcgggattgccgctaagaaacctggtacgatcgtttatccgtgcgaaaaggttctctgtttggaggtcgacgtccaggcgcatcgcgccctggaagtacttcaccgccttggggaacaggcttatagcaatggccgtggcactagcttcggtcttcacaccggtccgtcctcttgccttaatctttccgccgccgcgctcgctacatttttcaaacgctcggatctctgttcccttccattgagtgatgcttttgtccttttctgcgaccacgccactggcgcctacagcgccaagaaagatggccttccgatcactgccttctcccccacgagcaccaatcagttcgaactcgtagagcctcaggtcgtcaaggcatatgttctcggacttttcgacgcgccgacgatggttacgccccgcgacaaaacgcgagccagcttctgcagccaatatgtacgtttccgtgaaccgcatccctgtgaagagttcaatgaaattggagttttgatcctcgatgctgctgctaaaatgctcgaacgttatgcaaaatttctagaagatggtggaagagatgatgatgaaatggcgaacataatagatgtatttgggttttgtcttaactagtggattgattgaaacaaaggagtccgagttgggattccctttcggtcttcgtcgtgcaacgatatcgtatgcgtacaggtatcacatttaacgttgctgcggcggaccgagcccgcttggaagcgattgttgcagctccaacttctgctcagaagcacgtgtggcgagcgaagatcatcttgatgagcagtgatggctcgggaacggtcgcgatcatggaggcaaccggtaaatccaaaacctgtgtctggcgctggcaggagcgcttcatgactgagggcgtcgatggccttttgcacgacaagagcagaccgcccggcattgcgccgcttgatggcgaactcgttgagcgtgtcgtcgcactgacgcttgagacgcctcaacaggaagcaacgcactggactgttcgtgcgatggccaaggccgttgggattgcagcctcttcggttgtgaagatctggcacgagcatggtcttgcgccgcatcgctggcgctctttcaaactgtcgaacgacaaggcctttgccgagaagcttcacgacgtcgttggcctctacgtctcgccaccggcccatgccattgtcctgtccgtcgatgagaagagccagatccaggcactcgatcggacgcaaccgggactccccttgaagaaagggcgcgccggcacaatgacccacgattacaagcgccacggcaccaccaccctatttgccgccctcaacatcctcgacggctcggtgatcggccgaaacatgcagcgtcaccggcatcaggagttcatccgttttctcaacgccatcgaggcggaactgccaaaggacaaggccgtccacgtcattctcgacaattacgcgacccataagcagccgaaggtccgcgcctggctggcaaggcatccgcgctggaccttccacttcgtcccaacatcatgttcatggctgaacgccgtcgagggattcttcgctaaattgacacgtcgacgtctgaagcacggtgtctttcattccgtcgttgacctccaggccaccatcaaccgcttcgtcagagagcataatcaggaaccaaagccgttcatctggagagcagatccagacgagatcattgcagccgtcaaacgtgggcaccaagcgttggaatcaatccactagcgtatgaacagtaataagaaaatcccgattgtgaatagtcccaatttcaaatgtgtccgtgtgtaatttgcgtgtcttcagttgaatttcctttaataatatcaaatattcaattgtgaaaagttgtattggttcaggttcaagctttccgaatttgttgaattttattccctgttttcaatttgttgacttgtttgggagacaccttttttgtgtttcgtgaacatgtcaccccttcggtatacattagcctacaaagtaaataacgttgataaatgtcactcatgttgtaataaaattgagcttattatgtataaccagaccctgtgttaatctaattacaaagaaattcatcattctcccaagcaatcctgagtagctgcgtgatggatcttccatatcagcgcccacgtttcaccccgtttgccgtcacccatccacgtagtggagtcaacctgaaccgtgcaatttctcaggcctttgtctgctatgatcagttctgcgaacggctcttgcgatatcagcaaagctggacggattgggtgttcgaccacggatttgcagaagccattgaagacgtggcgctggtgttccaggttgcaccttgccttcatggcccccgaataggcgcgctcgaagtgttgatacctcgtcgcacccaggtcttcatttatatgtcgaacaaccaattgcagcgctttgttgcacaccagtgcattgctcaacttggcgacgccgtgcttgcttgcatgatcccgccctacgcgagtgacctctcgctgcaggaaatggctcgggcgcacaacagattttgcccaggcagttacacgaggtccgcagacgtacagtgctttatcgccatccaactcagcagccgattcgttgaggagggcacatgtaacgtgcacgggcgaaatggcttaaaaagaacctgccgcttctttcgtcgccctgctgagttcttcagccgttatgacatcgttgccattgggccggtgctcttccatgatgaactggattgcccagcaaactgcaatgagcctctttcctgctttgacctgcggtacgactatcaggttttcctccaggagtgcgatgcccatgatggtgtggggcattatccggaaggcgcaccactacctagtgttgccatcgtaggaggcgggctgtctggccttgttgctgccacagaactacttggcgctggcgtcaaggaaatcactcttttcgataccgttgatgagatccgtagttttggggcatcgccgatgccaaacggcgacgctcaccaggccttgacgtcgttcggtgtcatgcctttctccgccaaccaactttgcctgtcatactatctggataagtttagaattccgtccagccttcgttttccttgtgccggcaacgaccacacagcactatatttccgccagaaacgctacgcatggcacgcggggcaagctccgccggggatatttcagcgggtacatgtcggatggaagacactactctaccaagggtgtgaacggaatggcaggagactgatggctccgatggatatctctttcatgttgaaagagcgtcgtcgtgatgaagcctcagaagcacggcagctttggctccgagagttcggaaaattcactttccatgccgttttggtcgagatcttcagctgtggtaattcgagtcctggtggcaaggcatggcaaacaccccatgatttcgaggctttcgggatactgaggttgggatacggccgagtttcgtcctattacaacgtgttgttttcaacgatcctggactggattatcaatggctacgaggaggaccagcatctttctattggtggggttcaacttttgcaggctctgatgcgcattgaaatattccagaaaagccatgcgaaagcacgactctgttttgatcccgtgcgtggaatagccaaggagggcgggagattgaaggtatgcttgaaacacggtcattcgcgtgtttttgaccaggtcatcattggcggcagtgctgaggccgctacagttgataacagactggccggggatgagacttccttcagctacaatatcgaacccgccgtcggaaactcgtctgccgctgtcaattcagcactcttcatggtcacgaagcaaaagttttgggttaactccggcatcccagcagtgatatggaccgatgggcttgtccgtgagctgtgttgcattgacatcgaatcgccagctggagagggccttgtcgtttttcactatgctttggatgactatctatcccggccgatcgagcatcatgacaagaagggacggtgcttggaattggtcagggagcttgctgctgcctttcctgaactggcttgtcacctggtcccagtcaacgaagactacgaacgatatgtcttcgacgaccacctaacggatggttttaagggagctttgtggagggaaaattctctggaaaaaggtcagtatatccaggatctgcctgggaataattttcctattggggatcacgggggagcctatctgattgaccgtgacgactgcgtcaccggagcctcgttcgaggagcaggtgaaggcgggcatcaaagcggcctgcgccgtcatccgcagcaccggcgggacgctctcttcactccaaccggtggactggaataaaaaatagaaatttcctgattaagttatagtcaatgtactattgcgtgttaatcccgtaggtatgcaagctgcaccggcagcatcataatttgatgttccatcaataaattaaggtgcccgttcattgtgtattacattatgtatgtttatcaaaaatataatcgaagtccattttaagtctgatattaattggaattccaaacgattccttgatgcctatcttcgctatgattgtatggtaataaagtctccacatctcccgaaaaatgctttcgtgatttacttgtctctcacgtgctttcgcatcttgacagccaaaagtgggcaacttgagaagagtattaactggccacgcaactcgagatattcccactaaccccaatgacgtcattgcactcgtcacgggtagcagccccacttgcctttgccactttattaattctttggcccactggccattaattggcacctacatatattagtggagaagataaagtgtcactatcgtttcctgttcaattttgaattttgcaaggatttcatgttgtcaactacacagcttgaaaggaaatccgcaatcaacggagaaacgtcaacatctcgacaaaaaaagaatgcttcatcattgcgtagactgcatattgaccgctcctttcggcgctgggcctgcttttactgttgcctagcgttcggacagccaccagagaatgggctatatagatcctttcatcaaaccaaaacattactaagatcatgctgtaacgcttcaatacggtgagtgtggttgtaggttcaattattactatttttgaagctgtgtatttccctttttctaatatgcacctatttcatgtttcagaatggaattagccggactaaacgtcgccggcatggcccagaccttcggagtattatcgctcgtctgttctaagcttgttaggcgtgcaaaggccaagaggaaggccaaacgggtatccccgggcgaacgcgaccatcttgctgagccagccaatctgagcaccactcctttggccatgacttcccaagcccgaccgggacgttcaacgacccgcgagttgctgcgaagggaccctttgtcgccggacgtgaaaattcagacctacgggattaatacgcatttcgaaacaaacctacgggattaatacgcacgtggctggcggtcttcgattcatttccacgccggagatgatatcgaatatgttctgttaagttaaaataagctgcgagccatggcgcgattgtcctgttttattaatatagtactttaacgtctctttagagcgtttgtgtaatgtcgtgaaaatgttttatgtcaaatgtactgttgaactataatattataagtccaggtgtgtcgttgttgttgatactgcaatatatgtgtagtagattagatagtcatatgagcatgtgctgtttttggcaaaattcagcagcaggatcaacacagaagaaaatatttagtacaagaaaataggtcaacacattacaacgtacgctacaactcccaaggttctgtgtcacagactgcgggagggtacatagaacttatgacaaactcatagataaaggttgcctgcagggggagttcaagtcggctttaggcttctttcttcaggtttactgcagcaggcttcatgacgccctcctcgccttcctgatcaggccccgagagtcgcagggttaggtctggctccggtgaggaggcggccggacgtgatatcccgagggcatttttggtgaattgtgtggtgccgcaagctacaacatcataggggcggttttcagtccctcgccgcagaaagaaggtgcaagctacctctctcccgtaaacgttggtcacttttaactccagcaagtgaatgaacaaggaacttgcgaaaatggcgatgaagcattctaaatcaggttcctccgtgcggctgtgcggccaagcaaggttgtgaacacggagcatctcctggagggcgagctcgctccgatatggttgaatcgttgtcgccagcacggcctccattccaaatgtaatggattgttccttcagcactttctgcatcttctcgcgagaaagatagacaaatacatgttggtcgttttctcgagccagatccggctgactaacaaacataggaggatgatagcagactttgttcttcaagagctcagctagttgtttaagtatatatatcggtggagagttttccttcaaatctagcactgcaagagcccatcgtttctggaaatgcaggaggggtttgctatagtcacggctatagattgcaaaagcaaatcggatcccctcgaataggtttatctggctccatgctggagtgagatctactggttgaaatcgtggaaggaatagcaatttgggatccattgtgatgtgagttggatagttacgaaaaaggcaagtgccagggccatttaaaatacggcgtcggaaactggcgccaatcagacacagtctctggtcgggaaagccagaggtagtttggcaacaatcacatcaagatcgatgcgcaagacacgggaggccttaaaatctggatcaagcgaaaatactgcatgcgtgatcgttcatgggttcatagtactgggtttgctttttcttgtcgtgttgtttggccttagcgaaaggatgtcaaaaaaggatgcccataattgggaggagtggggtaaagcttaaagttggcccgctattggatttcgcgaaagcggcattggcaaacgtgaagattgctgcattcaagatactttttctattttctggttaagatgtaaagtattgccacaatcatattaattactaacattgtatatgtaatatagtgcggaaattatctatgccaaaatgatgtattaataatagcaataataatatgtgttaatctttttcaatcgggaatacgtttaagcgattatcgtgttgaataaattattccaaaaggaaatacatggttttggagaacctgctatagatatatgccaaatttacactagtttagtgggtgcaaaactattatctctgtttctgagtttaataaaaaataaataagcagggcgaatagcagttagcctaagaaggaatggtggccatgtacgtgcttttaagagaccctataataaattgccagctgtgttgctttggtgccgacaggcctaacgtggggtttagcttgacaaagtagcgcctttccgcagcataaataaaggtaggcgggtgcgtcccattattaaaggaaaaagcaaaagctgagattccatagaccacaaaccaccattattggaggacagaacctattccctcacgtgggtcgctagctttaaacctaataagtaaaaacaattaaaagcaggcaggtgtcccttctatattcgcacaacgaggcgacgtggagcatcgacagccgcatccattaattaataaatttgtggacctatacctaactcaaatatttttattatttgctccaatacgctaagagctctggattataaatagtttggatgcttcgagttatgggtacaagcaacctgtttcctactttgttaacatggctgaagacgacctgtgttctctctttttcaagctcaaagtggaggatgtgacaagcagcgatgagctagctagacacatgaagaacgcctcaaatgagcgtaaacccttgatcgagccgggtgagaatcaatcgatggatattgacgaagaaggagggtcggtgggccacgggctgctgtacctctacgtcgactgcccgacgatgatgctctgcttctatggagggtccttgccttacaattggatgcaaggcgcactcctcaccaaccttcccccgtaccagcatgatgtgactctcgatgaggtcaatagagggctcaggcaagcatcaggttttttcggttacgcggatcctatgcggagcgcctacttcgctgcattttctttccctgggcgtgtcatcaagctgaatgagcagatggagctaacttcgacaaagggaaagtgtctgacattcgacctctatgccagcacccagcttaggttcgaacctggtgagttggtgaggcatggcgagtgcaagtttgcaatcggctaatggttagtcgatgggctgacgagtttgatgtcaggagaagctgagtgtgtcacttgtttccctttaagaagtattaatgtaataaaaatcaagatctggtttaataactggatacttgatttcatcgcgctttttttgaatatggagtgcaccccatttcaccggacaagtcggctagattgatttagccctgatgaactgccgaggggaagccatcttgagcgcggaatggggatggatttcgttgtagtcctcgatccatccgtcgcctgcggcgaacatcacccgtcagcaattcaacgtgtcgatagtcgttagacataagcctgtcctcaagcctgtgcttgagcctttctgcttatgccgactgtccggtcgaaatggggggcagttcagaataaatgtttgttgtcttgactttaagatatcctttgaaatttgcgttattcgtatttcgcttttggttatttccaaaagactttgctcagtaagatcaaacgtttgtatttctccgagccacaatatttgacctatatgcactggcccacgcgccgcaatagatgaaaattgccaaaattagctatcggtcttctgaaaagaagggccgacatgttttcatagaccatgcaaagtcatactacctgaaactgataaataacgacaaagaaagtagcctatttaaaagtcgctatagcatgaattcaacacaaggaaaccaaaagtcggaaggaagactttaatcccggattatttggacatgataggagctatggggcaacgtgtcattttcatgagtgttgaatgattttctgtagcaaatagaaaacgttttttaaaacgatgtggccttggagtaatcagcggaagaaatggtcatgctcagataatttccgttgctgacctcgcaaccaacccctttaaatacctctgctgcccatgcattttgccaagttaacctaaagtggcagctgaatggctcgttattgcagtggtggctctcaacggcttcatgtcgatgattttcgttggatcaaggagcccactcgactgaaggctcagcttattaatgtggtggagacctacaaggctgcacaaacagagacgttaaagtactatatatcatctgcaactgagcgtgtggctcatgtggaggcagccgaggtcaacaatgcggaaatggagctgcatcctgctgggttgaagtaccctctgtccttcgtctttacctccctggccgtggctacagcctgcaaggagaacaagcatctcttgtgcgaggagcatttggagggggacttgatatcgtgcgtcgttcctccctatcagacaaatgtctcactcgctgctttaagggagctccacaattccatttcgggaggagggtaccaggaacaagcagacatggattattttgtggcgatcatcccaaatgataatttcgactatcagagctgcgaaatcgacacacgaagttgcggtaaaggactttgcaagatttatagtagggaactgggagggcagcctctagcttatgacgccatactggcaatcggcaaggtgctgctgctggaatagatagtgggccgctgatccgagtttgattttgtcgtattatgttacgtgaactttttatcatgcatgtttcgcttatgctcccgagtgtcggccatgttgttgtgttaaaataaaaggctgatgttaagtcctattgtaaaatacctttatagattaaatatatatagtataacttctgtatgccgtcgatgagcggttatatgattgtaatctatacgttgttgcaatcaatcgtattacagtgagccgtgcttaatgaaataaacatcatgttaaatgtctatttattcaatcaacatgcgatgacaataatcaaaaggggaaacgtaataacattgcggtggatacagcgtttattgggagatccgcgggccgatacacttaaataacatagacagaatttgagagagcacgcaggttgtagccaagttgagcgacttgccggtagcacggaagctaagctcaggtgttacaaatagacaggcgtcgaggcgacgagcacgacgaccttgccggacattgcggtcgcagggggctcaaagcggttggcttgtaacggaccttgtgtttcttgttgtagctttcatcgagcataaccattgggacggttgctgaacaacggtaacgcacttttttcacgggagcgaggtagaagaacatatttccccgtcggcagccggcggtgagcatgccaattcctaagggattcaatggactcgtgcgaacggtgagcatgccgttctgaccgtcggtgcccaatcagcaggccactcccaacatgttttccaagtccttaaaaccagtctttatagcattgatctcccagcaatctttattgaagtcgattttaatattcaaaagaagattttagtggaaagggaatataatcgcgtggccgaagaagagccttcaaaaatcagaatccactaggataaacaataatatctgaaaagcattgaatttgggttaggcacgagaggctgacgcggatgccactcgattgctagtggaaggattcccttttttctagcgtatcgaattcaccgtttcactatatgttttcctgattggttgatctgcgggaccaccattgactgccactaatatcgaaagtgggtctgcttcgattatgatgctttgtgagaggttctcttcccaatgcatgcaagctggcagattcggatactctcaatagagatcttatttcgcgtctcaaaaagttcccagaaatcaacaaaggggagggcaggtcctttaaatacgttgcagctgtcctttaaaatagaagagaatttacagctggaggcacagaccactaaactgcgaaagtaagcatggcagatgagttggagcgtcaattggaagccatttctctcattacagtcctgggtccggatgtgaaggctgagcttgaggcggagctacgagactactgcgaagatctcgacttctggaaaagccacggtttaccggtggcggatctcgatcagactgtgactgtcgacaagcttctatacatgtatatggatcgggcaacagcagacctgtgtgtgaagaatcgctgcctcgtttgcaacagtggcaattcagccgcaaaagtaacctcgcttccaccataccttgcaggcgtgacaagcgccgaggcctatgagaaactcaactccattgttgatgggagtgtcgccccccaatctcgtgggcctccctgctattttgtggcgttcctgcccagcagctgtttcgagaaaaccagtgagatatcggtgcgcacagtggacggcgagtgtggccccttcgatgtctttacccggcagcgtcagccacaggatcagagtgatatgttttttaaatatgaaggagttgtatgtgctggaaagagtgtatttatgtaagaattatcttttatagcctgtgttacgtttgaacccggtccgcgcggtattgttttcaataaatggtatgtgcggaggatataattggtctttcattggtgtgatttacgtgtaacgcggataataataaagtaaattacaaaagagaaacgcataattttattccagaatgattgcgagaaacgatgaaaatacatgaaaatgcatattgtcgccagggaaggatggcgccgaaataaacgaaactgagccaatacagtgacttgccaagcgagtttgatcctaccaaattcgcgcaaattaatgcccgtgttccatcgggccagcgagtttattcaaaagagtttcgtacacgtgggcggcgacggcaacgtcaatgcttgctagccctaccggcgagaagttggccggccccttccatgccttgaggtcattcatcaaggcctcgtcatcgagaatttcggtgtagttcttgatcccatcgcgcttgccgtgttgggtcagtttcataccgcgcctagaatagtagagggcaacggcatcaacgttgcgggcttccatcgcaacaaggtcatcggcgacaattagaccatccgcagataggacatgctcaatgtaatccggcggcatgtcatcaataccgagtgacaaagtgactgcgttgggggcgatttcagcggcttcgaataccggttttccgtagttggtcgccatgatgacgaattgagaatatggcaaaaggctacgatcgccgacagcttcaaggctaaaggttacgcaatcacgtaacttttcgacgagctcgaaattggatttcttaccgcggctgagcactgctaccttacgaattctcttagcggcaccatagttaagtgagagaattacagcttcggcaacttttccagccccaaacaagaaaacgtcgatgtcctctctgccttgcaacagcaggtttacgcatgctagcgagaaccaacccgttcttccattagaaattgccacgccctctaccgacataaggagcgtcccggacaccttgtcgcgcaggaaaatatcggagtgctggagcggctttccggtagcggcgttggttggcgcgaagtggatgtctttggtgccggaatatcttccgaaatagccaatgagtgctccttcagtccatccaggaacattcttgttgaacgttaggtaagctttgacatgtccggcttttcctgcggcaaacacctcccaataggacttgagagcttcgtcaacaaatgctggtgtgatctggatatcgaggtttgatagtgcagattcagtccagtgtacctcgcaaagttgtttggccatctgccttgtaggtgcgaattttctctgctcaaattgttgaggttagcggatttgtaaacgcgtttatatgggctgcttggagggtacttttggattaatttttttctgccagcgcattctgacgcggcaccgctttggaaagtgcgctgtgggtccgcgttttctacaataatgtgccgatccggtcagaaagtatatggatgagttgtgccagcctcaccaacgtgctgcaggcccatcatgactacttcaatgttaatgggggtaatgaataaataggcgaaattgggttcacggtgggcccagggaatataatattgccgcagaggtagtcggatgccaaggcccgcaactaatagttcacgaacaaattcattgtagtgggcggccaactccaaaaccaattgccagttattgtattgcaatacatatatgagtattcggatacaactaatttcattaaataatattttaagtgtggacagaatagcgcctaataaatttgcgaatgttgtccaattgacgtttttataggtaactcgataaatcgtgcttttgtgatattctgatgcggacaatatacatttaaacataaagatataagttattgaggcatttatgtatattacaatagtggggtacatttttcacagatgctgtcacccatgaaatattggcaaaatactcttaaaatatgcaagaaactaaagaggatgcatgggttgggctgtaggtacatggatgcaaatgctgttttgcaataagtcatatagtctcgtctgttgagtgaggcccattcaatcagcaagtaggactgaggctgcatgatcgacatatttttgaaccacagttttggcaagtttttcatacaaatgcacggctacggccaaatcgtagcttgcaagtccaactgctgaaaagttagccggcccgttccaagaaattagcctttgcataaggactggatcgcggagaacttcagagtagttcctgatcccattgtccctgccgtgttttgttagctttaaatggcgtcttgaatagtgcagcgccaacgagtcgatattacgtgtttccatcgcatccatatcatctgccaccacgatgccactcagcttcaacacgtgatcaaaatagtcagctggcaattcgtcaattccaagcgtcaatgtaacggcattgtctgtgatctccttcatctcaaagacgggcttgtttgaattcgtcgccgtaattatgaacttggatttgctgagatatgctcgattgttaacagccttgagtgaaatcttgacttccggctgaagcctttgcaccaactcatggtttgactggttgcagcggctgagaatcgcgattcgttgaattcttccagatgctcccgaattgagggcgaggatgatggcctcggcaactttacctgctccgaataggaagacattgatctggcttcggccctgcaataggagattcaggcatgctagtgccagccaaccagttctcctctccgatatagccaccccatcaacagagaagagacgtctacctgtgaaacgattgcgaagcacaacgtcgatgtgagaagtcggttctttgtatctcgcgtttgacggattagaatggatgcttttcacacccgaatagtcgccgacgaaacccaccagagctccctccgtacagccctctcgatcaagtggaacgaagaccttgttgtggccgagccgcccttcagcaaagaggtgccaataatctttcaaggcatccgcgacgagttccggtgtaatgtatattccaaaagccgatagagattcctctgtccaacattgctcgtgtatttgatcggccatgtttgtgtttgatcagcctcctttcgaaaatttcttgagtttcgaataattctaaaatcgaaggacgattaatagtgccataccaagacaagaagggtaggtgggccatcaatccacaagcctagcacattttgctgtctgctcatgcaaggtatccaatggaagcctggattggttagccgaacttggtgggttcaattggagcgggcaggtcactttttgtctctcaaataactgaaactaagttttgttatttggtatgtgtttgtctgttctgccgaaggtgcccgaatttgcgcaaattcctttctaaaaaggcttacatctagcaaaaggtgagccctgtgcatcccagcatttggacaaagcgcgccaattcggacagcgactggctgcgttggaggctcggatctcaaagaatagaaaagagttatgatcatgttcagaaccgccaattttgtgcggtatgagctctttgatgaaagtaatggtttcaaaaaagcaacatcgtgggtgaaaggtacctacatatcttcacagacaataactactgttgctgtttgctgattgactgacaggatatatgttcctgtcatgtttgttcaattgttcaattgttcaattgttcaattgttcaattgttaatgtataagttcgtgatgaaggatggttgttttaaaaatagtatgtttgactgaggttaagtcactcacgttttgcacatcgacggaccgtaagcattctttcggtaagaccgaagctcgtcccagataataggccccgtggagggaggccttgtatgggccggccgatgggcgtgctgagccgagtacggcgacgcctgcggcgattgcgcgggcggcactgcgcgcaggggcacgggttcatacgaggacgagcgtaaggggcatagagctttccgcccgtcgggtttcagccatattgcttgattgcggccgactggaatgcagccaggtcgtgctcgccggcggcgcctggtcgagcggcatgctgcgcacctcagtgttcggcttcctcagctcacggttactgtgtcggcgctaagaaccgaggcctttgatggcggacctggccttttcaatcaagggatgctgattttccatccgtaagcgtctcgacggtggttacaccgtcggcttcggcgcgacgatgagaaccgaaatcgtcagcgatagctttcgttttctgtcggattatttcctcctgatgcgagaggaatggctttctatccggctgccggcgggtgcgcgcgtccggattgaccctcccgttcgttgctacttggctcgagtgacgaaatagcacgcctggtgccgctgtatcatgtccatcgggctcacaggagattgcgctcgtagcgcgttggtgtcactcaccaacacgcgtcgtcgcaccaaattggggaggatggtagcggaatcctaaaatcctaaaaccataccgacgcgtcacggcgctcgtgacccctgcgagcgacgcggcactctctcacctgatccgtgctgcggttgctcaatacgcaatgagcattgtcacggttctcagggtaaacggcaatctcttcgtcatgcgggcgtggatgctatcaccgttagaaagggcctgcccccatggtgggtctctaaggttcagtctgagaaggggcagccagagcggcactgtttgaagagcagtctgaaccgctcagatcgctcgcatcgatgcttgggcggcgtcctgcagtgcgcgttcgagccgtagcaccgcgggacgctgagcacgtcctgcaggctgctcaagatagtagttccccggaccaggagtttttgcgaccagcggacagacctctagtccgagggacgccccaagaggaccacagacaggaagatgtccgatagcaagtcccagcccctggctaaccatcatcagggcgagcggcgtggtatcgactacttcgagtctaagattgcgcccctgcatggctccgaaattgtggttgaggagcgcggtccatcccatggcatgtgagacgacgtcaaacagcttgaaggaaagaatgtcctcgaggctgtggatcgatgcgagctcctcgcgccgacacataacgacatgcgacagtctcatcagccacatgggatgacgaaccaagtgcggttcctctccaaagcggattatcaagtccggttcggcattacgttgcgaaccatccatgagaaggccgacctggatcgacgggttctcggcctcgaaggcggcgagaaccttcggaagccaactcatcgacatcaattggcttgcaagaagcgtgactttttcgacgcgttggcgtccgaacatcgcctgcgccttgctttcgatcgatcccagcgacacctgcaccgtcggaaggaagtcagctccgtccagcgtgagagtgatgcggtttgctgttcgctcaaagaggggacgaccaaggtgggtttcgagcgcgagaacctgctggctcaccgccgcggaggacatgtttagttccttgcccgcgcgggcgaagctctggttccgggcagccgcctcaaaaacgcgcaaccaatttagcgaagggataaggcttggggtcatcgtcggagcataagtaaaacttgcggtaagcgcaattagataccgagtctacagatgctgaaccgggtggcataactctttcgggaactgcccatcaaaaacaagggaacaactacatgttaaaccgcagaatgctactctcgctcgctgccttgccgctcctcgcaggtccggccctttctgacagtctccccgatcatatcaccgtggcaactgagggcgcatacgcgccgtggaactataccaatgcggacggcacgctcgccggctatgagatcgacctgaccaagcttctctgtgagcgcatgaaggtgaagtgcgacattgtcgctcaggaatggagcggcatcattcctggactgacagtcggaaagtacgatgcgatcattgcatccatgggcgtcaccgaggagcgcaagaaggtcgtcgcgttctcgaagccctatgccaaagctcctaacggcttcctcacatccagcgacaatgccatgaaggacctgccggatgcgggcaagtcatacgatctggcgaagtcaccgaaggatgccgaagcggccttagaaaccctgaaatcgaaggtatccggcaagatcgtcggcgtgcagacggggtcgacggcagcgacgttcgcttcacagtacctcaagggagcggacatccgtgaatatccttcattcgagcagctaagtcttgagctcaatgcgggccgcatcgatctggccgttgccaacgtaaccgcgttcaaggccgccattgatcagagcaagggaacgctggtctttgcaggaccaaccttctcgggcggcgtcttgggacttggtacaaccaacgtggcacttcgtcctaaggacgaggcactgaaaaaggcgttcgacgacgccattacgtccatagacaaggacggttcgaacaaggctcttaccgaaaagtggtttggcgtcgacatctcgacgcaagagtaagacggctgtccctcctcgcgaatgaggcgggatttctcccgcgcgctgaagcgccgtgggcattccaatcttctgtacaggtgacggcatgttcacgcccatcgggtcctccgaggcaacgatcactattttcttcgagaacgagcccattcgggcccgtcaaggcgagacggtggctgcatgtctgcttcgagccggtgttcgatacttcaggacgacacccgtctctggatcgaagcgacttccgtactgcatgatcggccactgtttcgactgtctggtcgagatcgatggaatcggaagtcgccaggcatgcctttcccaggtccaagatgggatgaagctgcgagtccagtcgggcgcggcggccatcgacgggaactccgaccaatgaacgcgatgatcgacaatcagccttccaagtatgcggtctcgcctcctatcgacgccgacgtcgtggtgatcggtgcaggccccgccggcatgtccgcggccattgaacttgctacggctggctgtcgggtcattgttgtcgacatgcagccgtctccaggcggccagatattccgtgcggtagaggcgaaccatgccgcccgcccgaacacggagagtctgcttgccgcgctcggtccggcttacgcggccggcttcgaactcgttgagagatttcggtccactcccggcatcgactatcgaccggagaccacggtctgggaactgcgcgccgacggtaccgtgggctggctgcgggacatgtccgcgggctatctccgggcgtcgtgcgtggtcctcgcaaacggcgcgatggagcggccggttccgtttccaggttggacattgcccggtgtcctgactgcgggtgccgtgcaaacgctcctcaaggcggggcgcctgaaacctgaaggtaggattgttctggcgggagccggacctttgatcatgctgctggccgatcaactccgccgtctgggtgtacgacccgtactcatcgcgcgcaccgacacgttcggagacaagttcaacgccctttccaaactcaggatcgccgcgcttccagctctcggcaaagggctggggtggattgccagcctcaagatggccgggatacctatgctcactggcatttcaaaccttcgcgcgcatggcgtcgacgtcgtcgagtcagtcagcattgacgtgggcggcaagaacatgacggtgccttgcgacatgctcgtggtccacgatggcgtcattccgtccactgacctcgcacacggtgcgggcctggcgatggaatggcttcatggagactcgagctggaggcctaaaacgtcgtccgaaggactggccgaggcggcgcccggtccggcgctcacttccgggccgtgccggattttcgtctcgggcgatgcccgtggcatcggtggcgcagacgctgccatggcgcacggccgccacgtcgccgcatccatcatccgcgatctcggaaagtccatctcgaccaagcacggatccgcggcaaaagcacttagtatcgcgatggccggccgacccttcatcgatgccgcgtttcctcccggtctcgccgggcgcctcccggaggacgataccatcgtctgtcgatgcgaagagctcgatgccgggacgctgcggaaggcgatccgcgaaggcgcacgcgacatgaaccttgtgcgcggcattcttcgatgcggaatggggccctgccaaggccgtcactgttcgataacgctcgcgcgactactggcagaggaaggcgtcacggatcggccgcatcttccatttcgggccagaccgccgcttcggccgattccgctgggcgcacttgcgaacctctcggggctcgatccggaactcgcgcatattgtctccctcgatgacaagcctaaagcgagcatggaggacgacgcccatgaatgagaaggtgcgcgacttcgtcattatcggagggggattgcagggatgttcaatcgccttctttctcgctcgcgccgggaggcgggtcacgatcgtggagaagagcattccaggcagacatgcctccggcgttaacgccggcgggctgcggctcctgcttagagatgctcgtgaatacccgctttcgctccgtgcgatggaaatgtgggagaacctcgaccagttcgtcggaggcccggctgccgcggctgccgaggtctgtctcggaacgtcccagatcgcccttgcggtcgatcgcgaagaaatgcagtgggcggaatcccgatcgaaggacatgatccgtcgaggcatcgtcacagaggagcttgtcgacgcagcggagctgcatcgccttcttccaggtctgacgaactcggcgctcgggggactgatttccaggcgcgatggccatgcaaatccagctagcgcggctagcgcgttccggcttgcagcagaaggagcaggcgtggagatctgggaaggctgcaacatgcgcggcatgtctccgacgtcgtcaggatggcgcacggagacggatcgcggcgcgatcgaatccgacgtcgtcgtaaactgcgcaggcgcctggggttccaagatcgcggcgtccgtcgacgaggaactgcctgtcaacgtcatggcgctttcaatgatggtgacgacgcgcgtcgcacctttcgtgaagcccgtggtcatcgggatcgaccggccgctctcgttcaagcagagcgccgtcggatctcttgtcatcgggggcgggatttcgggcaagccatgtctggacgacgacacctcgttcatcgtgatggatcgcatggcgtccagtgcggccgcgacggtcgcggccttcccagcgctcgcgaacatttcggtcgtccgaagctggacaggtctcgaaggcctgacgccggatggcgttccctacattagtcccagcgcccgtcatcccggactgtggcatgtcttcggcttctgcggacatggcttccaactttcgccggccgttggggaaacagtggcgcggtctttgacaaccggatccctcgatccaagactggctccattcgccgcggatcgtttcgccaaagatacaacgcgggcgaaggaggctctgcgatgaacccagacatgatcgacctaataggttttgggccgcagggctgggggctacctttgttgaaagcggcaggggtcactctcgcggccgccgcatgcggttttcttctgggtagtcttcttggcgtgatgggatcgatcctgaagctgtccaagcatgtggcgctcagaggcatcggaagcttctatacaacggtgttccgtggcgttcctgaaatccttgtggtgtacctgttctacttcggaggcagccttgccctcacgaagcttatgaatgtcggagggatgaccggcttcttctcgctgcccggtttcgccaccggtgtcatggcggtgggtataatctccggagcatatcagaccgaagcgtttcgcgccgcctacctgcgactcgacaggggacagatcgaagctgggctctccacgggaatgtcgaactttctgcttcttcgaaggatcatcgcaccgcagaccctgcgtttcgcgcttccggccctcggcaacatctggcagtccgcgctcaaggagacgtcgcttctctcggtcatcggtcttgttgaactgctccgccaggccgggaccgccgccggatcgacgcaccagccacttctattctacgccgttgccgcggggatgttcctgatcataggaagatccaccggcttcttcattcggcggttcgagaacactctagctagaccgtggaggcgctgatcgtggattggcaattcatgtccgaagtcctgcaacaacttcttgcaggactcccccttacaatacaattgactgctatctcacttgcggcggggttcgttttggccgcggtggttttcggcgccacgaacagctcggtgcctccacttcgctggcttgcgctgctccacatcgagctgtttcgcgggacgccgctgcttctgcagatatttctgatttactacggtctgggacagatcccattgctccggcactccgtcctttggcccttccttcgcgaaccctattggtgtgcaatcgtagcgcttgccctaaacacctcggcctacacggcagagatcatccgaggcgcgatccaggctgtcccgcaaggagagatcgaagcggcacgcgcatgcggaatgtccggattgatcctgcgtcgtcggatcatctggccgatcgcccttcggcagggtcttccggtttatggcagcgaggtgatccagatgatcaaagcaacgtcgcttgcaagtatcgtgacgctgaacgaggtgactgggatcacgtacaagctggtctcttccacctatagggtcgtcgagatcttcgccgtcgccggggcgatatatcttgctttgaatttccttgtgagcgccggcttcatgctgatcgaacgctcacttcacgcccatctcgcgcatcggcgcgcctgatgacaaccatggagaaactcatggccaccacaaatagcagcgtggctgcctcccaagcgagtggagccgcagcgattgcggtggagggtctgcacaagcacttcggcgacctcgaagtcttgaaaggcatcgacttcgacgccggcgacggcgaagtcatttccattctgggagcgtctggctccgggaagtccacctttcttcggtgtctaaatcttttggaacttccctctgctggacggctgagcattctcggtgaggaagtgcggttgcgctcgaactcaacgggactccacatcgctgaccggaagcaggtcgatcggctccgcacccaggtcgcgatggtcttccaaaacttctgtctctggcagcatatgaccgtgctggaaaatcttctggaagcgccggtgcacgtccagaatagaaaacgcgcggaagttcgcgatgaggcggaggctatgctcgaacgcgtgggcatgaaggagcgcatgaaggcatacccggcacagctctcgggggggcagcagcagcgcgcggcgatcgcacgtgcgctagtcatgaagccgaaagcgctgctgttcgacgagcctactagcgcgctcgatcccgaacttgtcggcgaggtcctaaaggtaatgagggatctcgcctcggaagggcgcacgatggtgatcgtcacccacgagatggcgttcgctcgtgacgtgtcaagccgaatcctcttcctggaaaaggggcgcatcgccgctgagggtgcgccgaaagatctttttgggggcggtgtgaacgagcgcttcgatcagttcatctcgcgatttagtcaaggctgaagcaattacagaaagcctaacagcgttcccctcgaaggtacatagaggactaatggcagaacaaaggaatagccttatgatccagcggtttgagactggcaagcgaatgagccgggtggtcacgcacaacggggtcgcctatttagccggattgacggccgatgacctcgctgaggacattgcgggtcagacgaggcaagtgctcgcaaaaactgaagcaagactcgccagcgccggaaccgacaaatcccgattgttatcagccacgatctggctccgccatattaacgacttcgatccaatgaaccgggtttgggaagagtggattgatcctgccaacccgccgacgcgagcgacggctgagtgcaggcttgccgacgacgatatcttaatcgaggtcatctttaccgctgcgtgctgattggcttcctgtcttcagcggatgcggtgatcgattcggcgcagcctggtgagggaacagtctcgacaatcatcgcggttctaatctgcagagagttgttaaatcaggtcagtggcatgcaatagcagcgagattgcgttatggaaccgtggatactaccgccatttgaaaagacctgccttgggtggattgcccagggaaagacagtatcggacatcgctctgcttgagggtaagacggtcgcggaaatccagcattacctggagcgagctgtgttattgctcgatgtaatatctatagcggaggctgtcgaaaaaatgaaacgcctcgacgaacatgcaccggcgtccgccacggatgcctgatccgttcgcagattgatggtgggacaagctgaggcgctacatatgatcagtctcacccacttcagataggagccattgctggaagaggtcgacaaccgagctcgtccgtttttcttctggtcggacaacataataagcgttctctgtcgacatggctaaatttgcgatcggagccagtgcgcccgatcgtacctcgtcttcaatcaaatacgtcggcgatagcgctaccccaagtcctgccacggcagctgccgtgatcatggagaattggtcgaagcggagtccgacgaacgcgttttcaacagacagatcgtgaactcggcagtattctgcccaaagcttcggtctcgttgtgaggtgtaacagcggagcttgcgagaggaaatcagacgtctcacccttaagccgatcggcaaggcgagggcaggcaacaggcagcaccttttcgtgacaaagaaacgtggacacgccgccggcccaagtcggttgaccgaaatgaattgccaggtcgaaattgtcctcttcgaagctgaacggcttcgcgcgagattccacagtaatcgccacgtcctgatgatgggcaagaaaactgcccagccgtggcacaagccactttgcgccgaaagtgggaagggtcgcaattcttagggacgccttcatctgtccagcagcaacggctccgatcataaatcgctccgaacgggcgagcagctccttgacctctgggagcaaacgtcgtcctgcctccgaaaggatcaccctccgccggatgcgttcgaaaagcttcaatcccgtttgctgctccagctcagatatctgacgacttaccgcgctctgggttagattgagttcctccgcggctctcgaaaagttctggtggcgagcggcacactcaaaagcttggagattaacaatgtccggaacaagggcccgccgcatatctattccattttcgcatcaagttagcagaaagtctcacagtacagggttgctatcgggccgtatagtgcatttcgagcatgaagtcctaccgttttcgaaggttgagcaaaatggcgaagcacgtcacgtcgagcgaaatccggtcgtctttttccgcggccatgtcggccatgtaccgcaccgaggttcccgcttacggaacgctcatggatctggtcgcccgcgtcaatgacgaagcgctttcagccgagccggaactcaggactcgtctcgaagcgaccgacaatctggagcgcatttccgaggagcgtcacggcgcgatccgcctcggaacggctgaagaactggcgatgatgcgccgcgtcttcgccgtcatgggcatgtatccggtcggctattacgatctgtcgaccgcgggcgttcccgttcattccaccgccttccggccggtaggcgacgcggcgctgaagcgcaatcccttccgcgtcttcacctcgctgctccgcctcgatctcattgtcgacgcgcagctgcgcgaggaagcggcaaagatccttgcgacgcgccgcatcttcaccgatgaggccatcgagctgacgacgaaggccgaagagcaaggcgggctgaccagggaagaagccgatcgcttcgtggctgcagtgctcgaaaccttccgctggcacgacaaggcgatcgtcgacgtcgcgatgtatcatcgtctgcatgacgcgcaccgcctgatcgccgacgtcgtgtccttcaaggggccgcatatcaaccacctgacaccgcgcacgctcgatatcgacaaggtgcagagcctgatgcccggctacggcatcgcccccaaggcagttgtcgagggtccgccgacccggcgctgcgccattctgctgcgtcagacatcgttcaaggcgctcgaagaaggcgttgccttttcggatggcaagggtggctggcagaccggctcgcatacggcgcgtttcggcgaaatcgagcagcgcggcatcgcgctgacgccgaagggccgcggtctctacgaccagcttctggaacagtcgcgcaaggtcgtccgcccggccgccgacggctcgaacgctgaggcctacgaggcagcgcttgccgccaccttcgaagcctttccggatgactgggtggcgatccgcgccgaggggctcggctatttcagctattcgctgaccgagaagggcatgaaggcatcgacggatgcggctgacatcgaaaccctggtttcagaaggtctcgtccagttcgacccgatcgtctacgaagacttcctgccggtcagcgctgccgggatcttccagtccaatctcggcgatggcgcgcagcaggaattcgttgccagccccaaccagcagcgcttcgagaccaatctcggcgccaaggttctcaacgaattcgatcactatgcagggattgagcaagcatcgatctacgactgcctttcgaggctctcgcgccgcccggcggctcagtaatcgtcaaacacggcagcaatccgcacattggagtccggcacatgaacatttccgtaaagtccccttcggtcctcgacgaagcacacgtcattctcgatcgtctcggcgtcgacaagtccgcctataccgatggcaccatggtttccttctcccccatcaccggcgagaagatcggcaagctgaagaccgtcgatgcgaaggacgcaggcgccgcgatcgaacaggcgcataccgccttccagacctggcgcctgacgcctggcccgaggcgtggcgaactcgtccgtctcctcggtgaagaactgcgtgccgccaaggccgatctcggccgcctcgtctcgatcgaagccggcaagatcccgtccgaaggcctcggcgaagtgcaggagatgatcgacatctgcgatttcgccgtcggtctttcccgccagctctacggcctgaccattgccaccgagcgccccggccaccggatgatggaaacctggcatccgctcggtgtcatcggcatcatctccgccttcaacttcccggtcgcggtctgggcctggaatgcggcgctggctctcgtctgcggcaacagcatagtctggaagccgtccgaaaagacgccgctgacggcgctggcatcgcaggcgatcctggaacgcgcccttaagcgcttcggcgacgcaccggagggcctgaccgccgttctgatcggcgaccgtaccatcggcgaagtcatggtcgatcatccgaaggttccgctggtttcggccaccggctcgacccgcatgggccgcgatgtcggcccgcgccttgccaagcgttttgcccgggccatcctcgaactcggcggcaacaatggcggcatcgtctgcccgtcggccgatctcgacatggctctacgcgccatcgccttcggcgccatgggcaccgccggccagcgctgcacgacgctgcgccgccttttcgtccacgacagcgtctatgaccagctggttccgcgcctcaagaaggcctaccagagtgtttctgtcggcaacccgttggaatccaccgcccttgtcggcccgctggtcgacaaggcagccttcgacggcatgcaaaaggcgcttgcggaagccgccaagtacggcggagctgttcatggcggacagcgcgtcgataccgacagtgagaacgcctattacgtcaagccggcgctggtcgaaatgccgaagcatgaaggcccggttctcgaagaaacctttgccccgatcctctatgtcatgaaatactccgactttgacggcgtcattgccgatcacaatgcggtcggcgcaggcctttcctcgtcgatcttcacgctcgacatacgcgaggcagagcgcttccttgccgccgacggctccgattgcggcattgccaacgttaatatcggcacatccggcgccgaaatcggcggggcgttcggcggcgaaaaggaaaccggcggcggtcgcgaatcaggctcggatgcctggcgcgcctacatgcgccgtgcgaccaacacgatcaactattcgaaggccctgcctttggcacagggcgtatccttcgacatcgcataaggtggacctgtcatgacgatttcagcgaaaatcgaggaggcggacttccggcccgcttcgcggatcgcatcggtcggcgtttcgaaaatcctccagatcggcgcgaaggcggccgccatgaagcgtgatggccatccggtcatcattctgggcgccggcgagcctgatttcgacacgcccgataacgtcaaggacgcggccaaaagggcgatcgatgcaggcgagacgaaatacaccgctctcgacggcacgcgggccctgaagaaggcgatcgtcgagaagttccgccgtgagaacggtgtcgattacacgaccgaggaagtcacggtctcgaccggcgccaagcagatcctgttcaacgccttcatggcgagcatcgatcccggtgacgaggtgatcatcccgacgccttactggacgtcctattccgatatcgtcgagatctgcggcggcgtttccgttctcattccctgcgatgcgaaggcggggttccgcctgcgggccgagcagcttgaaaaggcaatcacgccgaagacgcgctgggtgctcctcaactcgccgtccaacccctcgggcgctgcctacagcgccgaagactatcgcccgctgctcgacgtgcttttgcgccatccgcatgtctggctgatggtcgacgacatgtacgagcacatcgtctacgacggtttccacttcgtgacgcccgttgccatcgagccgcggctgaaggagcgcacgctcaccatcaatggcgtgtcgaaggcctacgcgatgaccggctggcgcatcggctatgccggcggccccaagccgctgatcaaggccatggcggtgatccagagccaggcgacctcctgcccctcctccgtcagccaggctgcttcggtcgaggcgctgaacgggccccaggacttcctgaagggccggcgtgatagcttccgccggcggcgcgatctcgtcgttgctgccctgaacgccatcgacggccttgactgccgcgtgccggagggagccttctacaccttctcgggctgcgccggcacgctgggcaaagcgacgccgagtggcaagaagatcgaaagcgatcaggacttcacggattacttgctcgaagacgcgcacgtggcggtcgtgcccggatcggccttcggtctctctcccttcttccgcatctcctacgcgacatcggaagcagaacttgtcgaagccctgggccgaataaaacgggcttgcgaagcattgcagtcctgatcgcaaagcccggacagaggtcgcattatagaacatgatcccacgtctccgctctgatcttgatacagtccttcccgaagctagcttcttcgaacgccttatggaggctggcttcacaggggacgttgaggtcggcgctgcttctcggacggttttttcgaccgataactccatctaccaaatggcaccggcgggaattgtctttccgaagggcgtcgaggatctgaagatcgtcgccacggtcctgtccgaacctgcttttagcagcgtaaccgtagcgccgcgtggtggaggcacaggcaccaacggtcagtcgctgacatccggggtcgtggtcgactgctcgcgccatatgaaccggattctggaaatcgatccggtccgaaaaatggctcgcgtcgaagcgggcgtcgtcaaggatcaactcaaccgcgcgctgaaacctcacggacttttcttcgccccagagctttctacatcgaaccgtgcaacgatcggcggcatggtctcgacagatgcgtgcggtcagggatcttgcgtctacggcaagacctcgaaccacgtcttgggtttgcacgtcgtcctgatggacggatccgagtggtggtcgcggcccttggacgatgccgggcttgccgatatcgtgagccgcgaggatcggatcggcgacatttaccgaaccgtcgaacggattggccgggagaagcgcgaccgtgtcgctgagatcttcccgaagctcaatcgatacatgaccggctacgatctcgcgcacatttgccaccccgacgggggctttgatcttaacgccatcctgtgtggctccgaggggacgttggtgatgatcgcggaggtagagctcaatcttttgccgatcccggcccatgccgccctgatcaacatccgctacggcgactttaactccgcgctggaggatgcacgtaccctcgccggcctcaaggtggcctccgtggaaacggtcgatgagaaggtgctcggcctcgccaagaccgacattgtatggaatggcatcgcctccttctttcccgaggatgaggaggggtccgcggatggcattaacatcgttgaagtgctcgccgatgatgcggcggagatggagcgcaagctaagcgagattacctcggctctcgacggaagtgcttctgcacgccaccgaggctacaccgtggcccgtggccatgccgacgtggaggcaatctggacgatgcgcaagcgcgcggtcggcctcctgggcaatgtggaaggacctgtgcggcccgtacctttcgtggaagataccgccgtgcccccggaaaatctcgcggcctatatccgcgaatttcggttgcttctcgatggcgccggcctttcgtatgggatgttcggccacgtcgatgccggtgttctgcatgtgcggccggcgcttgacttgacccgggaagatcaagtgccattggtgcgggacatcagcgacgccgttgtggcgctgacccgcaaatatggcggtgtgctctggggcgaacacggcaagggcgtgcgttcggaatatgtgccggagttttttggcgatctctatccaagccttcaggagataaagcggacctttgatccccaaaatcgtcttaatcccggaaagattgccaccccgggttctcagcccctactgaaaatagaccaagtcccacttcgaggagccgttgaccgcatcattggcaacgaaatccgtgccgccttcgacaatgccgctcattgcaatggcaacggtgcctgcttcgatttcaatgagacgagtccgatgtgcccatcgtacaaggccacgcgcgatcgacgtttttcgccaaaaggacgggccgccttgatgcgggaatggttgcggttgctcactgaaaacggacttgaccccaggcatgaggccgaacgcatccgccagacgcatccgctgctgggcctgccgatacggcttttcaacagtgtcgatccgcgaaatagaaatgacttttcacacgaggtccgcgccgtgatggacacctgcctcgcctgcaaggcgtgcgccggacagtgttcagtcaaggtgagtgtaccgtcgtttcgatccaaattcctcgaactctaccacgaccgatatctccggccgttgaaggatccactagttgcggccatcgaaacaacgctgccgtggatggcgcgggtgaggccgctctacaatttattggccgccacgagagcaggcaaacgaattctccgcgttgcggggctcacggctttgcccgtgcttcctcgcctttcccttcgccgcaaggcagcccgtctcggcattgcccttgctacacccgaccggctgggacgcttgtcgcctgaggacagacggcgcgcggtgataattgtacccgacgcattcacggctcatttcgatccgggggtcgcgctggctgctatcaacctggccaaaaaggcggggttcattccgtttctcaccgccacccatgtcaatggcaaagccctgcatgtgcatggctacctcaaccgcttcgagaaggtcgcggaaaaaacctcggcctatctgcaaagcatcgccggcttcgacattcccctcgtcggtctcgatccttcgatgacgctcgcctatcgtagtgagtaccagggagtaaccagtgccaagctgagcggccaggtgctcctgccacaggagtggctgtccgctaatctcggcgtgctggccgcaaaagctggaccttcacgggaacgacgctttcggttgatgatccattgcaccgagcgcacgaatgctcccgcatcgacctccgagtggaaagccgtcttcaaagccctcggtgtcgatcttgaaattatggatgccggctgctgcggcatggctgggacattcggtcacgagacccgcaatcgcagtatttccgaacggctttacatgatgagttggaagcaggaggtcgatacggccgatgggcgcaacgtgcttatggcaaccggctattcctgtcggtcccaggcgaaggaaatagatgcggtgcggattccacatccgttcgaagtgatcgacacgctcatcagttagatcgtctcccggaggtcgcaaaacaaaaacgcccggccgcgtttgcgggccgggcgtgacattgaagtctgggaattggcttagccagcgtccttcagccgcacagcctccggattatagacttgtccgaaccggttgttgaggaactcgccgagtgaaatcccctcctgccggacaaatcccttctggggaagtttgccgttcgccagcaaatcgaggacggtcgtgataccggccgcggtggtgatctggatggcgctcatcttcttgccggcgacgacgctggcatagactttgttcgcgtaggtttcctgcagataacggccgtccttccagccgcagacggtgacgaagatcacgacgacatcttgcatggtggcaggcagggcgttttcgaacagatccttgagtacgtcccgtcggttcttcaagttcaggtcgtttagaagcgctttgatgatggcttggtggccggggtaacggatcgtgcgatagttcatcgtccgcacccgtccttccagtgatttggccagtgtgcccaaaccgccggatgtgttgaatgcttcataggtcacgccgtcgagggagaactcttcgcgctcttccatggccggtacggtgacaagcttgccttcgacaactgcttcacagggctcaatatactcgttgatcagcccgtccgtactccaggtgagattgtagttcagcgcgttcgacggatattgcggcaacgccccgacccgcatgcgaacgctatcaaggctgtcgaaacgctttgccaggtcgttggcaacgatcgaaatgaagcctggtgcgagaccgcactgagggatgaaggcagtgctggcgttctcagccagttcttccacctttttggtcgtcgcgacgtcctcggtgagatcaagataatggacgccagcttcgagagcggcttcggcgactttgcccgtcagattgaaaggagctgccgacaggactgcaaactttccgctgaggacgtcaacgagagctttgccgtctgcaatgtcgacagtcgcaacagcaatcgaggggtgttgatcaaccttggccagttgcccttcgtccctatcagtaacgacaaccttgtaatcgccggtttccgcaagcatcagagcaatggctccgccaatcttacccgcgccgataaccactatttctttcatacaaatcccctgtgttctgtatataggatatttataaaaataaccggggattggtcgaatcatagcggcaaggtgggcattatgttatatatttttgtgcaaaaagacgactgcacttggtaatatgaaggggttccgcatgcaattgaccgaaagggatcgggagctcctgtcgttactcggcgaaaatgccagaacgcctgtggcgacgctcgcgaaaaagctttctctatccaggaccacagtgcaggctcgcttggagcgccttgagagagagggagttattgtcggctatggtgtaaggctatcgaatgaatattcctcgagcttggttcgagcccatattctgatcaccatagcgccgaaggcgctttcacaggtgacggcctcccttgggaaggtcacggccgttatcgctcttcattctgtgagtggcacttttgatttgattgcgattatcgaagccccttcgatttcagagctcgatcagttcatcgatcaaatcggcataattgaaggtgtcgagcggacgctctcttcgattattctttcaacacgcatttcacgctgaaagagcaagaggccacagccgtgcgcctgctgccacctttccgacgatgaccatgcagaacttacggcctctatgtcggtgtattccacccaccgacgcgccatttccgtgtgcattaagataatgctttccgccccatcggattgctgttctgacatggtatatcattacgacagccaatgtttggcggctcgtacgaatcatcaagcggtcaacctgtgctgtcaaccgtcacgatatgagcaagcaactcaaacgctttcctattcaccgcacgcgcgttgttggctgtttggcaggatatatgccaacgtaaaaatgagggcaatcgattgtactgaatcggattttcaagggtctggccaaaactattccgtgggcacctggcacacgccctggagtccggcccgtttccagttgagggttgtctacgcttagatgagaaggaaagttgtccaagacgaatcccagtgtcctattaccaatagccggcgctagtttgatttcagaataaagagaaattcgtcacaccaaatattagaagcaatgtttgattgaccatcatacttaagatgaacattccaaacacagttataatacgcattattattgacacaatataaaattataatgttgatattccttgaaatataatattacaatagataaagtagaggaaattatgtcagaaatttggtttggctctgcttacgacagagtcggacgatgcctaaagtctattgcttcttctatcgctagtccaattgctaacagacgttcatccgagcttgcagagccatcgatttccatgccaataggcagaccgttggaactaagagaaacgggaagacttaggcccggcaggcccgcattactgctgggatctacattccgcacgaagattttaaaggtatcggtcattgagccattgtgaatcaccgatagatcatggccaattggcttggctgtcaacggagctgttgggaaaagaattgcatctagctgatgcgccttgaagtaactgtggtaggccgcttggagtctcggtctgaaaaaacgtcgcgccagacaatactcgcttttggaaataagattatccgagagttgtgcattgagaatacttgcaacatccggactgcgaatcgctctgacaacctcagaaaaggaaacaccctctacgaagttctgaatataatgttcaagggacaacggaaattcgtagatggcagtcggaaagctgaccccttcattgtgatgcgctaaatcaggaatatctgcttcaacaaaagtaacatctttgcgtgccagaactctgataatcgtctcggctgctaaggcgacatcgggctccaggtcgttgtaaaagtaagcggttggcaagcctatacgcagccccttcaggcggaccgtttgattaaccggcggtctcccgcaaatgataccgtcaagaagaatcacgtccggaacattctgtgcgataacgccaggggtgtcccgggtggggcttaccggaactattccgtccgttggatatcgccccacggtaggacgaaaccccaccacgccgcacaaggcggccggtaaacggaccgacgctcccgtgtcagttccgacgccgcccagcatcaatcggccggccaccgcggcggccacacccccacttgatccccctgggatgagactagggttccacgggtttcgtacggcgcctgtggcggagttgttgctcgtgatcccaaaagacaattcgtgcatgtttcccgaagcgccaggcagtgccccagccgcgagaagttgtcgtgcaactccggcaggcgtcttgggtttgtggttctgtaagcctggcgtaccagcggtcgcggcgaacctgcctgtcgcaatattcgctttaaagcataggggaacgccagctaggccaacaccggcacctccgtgttgatcgattttgctggcagtccaccgtaggtgcgcccagtcggtttccagaaaggcgtttaaggatcttgctgcttcacagcgggctattatcgtttcgattaactcaaagcacgagtattttctttccctgagacatttaagcgtctcggtgatcgaggagagggtcaccattttcgttgtgctgagggaactgagatagatctcgccagagaaacgttcaatgatttttgcttggagtgaaaaaggcaaataattatagaggaaggaagtcagaaatggctgcgcagtagggccacttgtataagtgccggtcgaacactgctggtggaaagtcaaaagcgtgaagtattagttgaactctgttactaaattgagataaatgggatattttattcgaaagtactgtttgagatctagcgacaataataatgtcatcttatgagattgcatggcaatatggatctaatatttggcataaatagatggtggttttgtctccacttttaaaccttcacagcgttaccctaacacctcttaattgcgtacactcctttcaaccgcatcaatggctggatcctccttcacattgccatcaactggctcagcgccccttgatatgatgcttatcgatgattcagatctgctgcaattgggtctccagcaggtattctcgaagcggtacacagagacaccgcagtcacgctacaaactgaccaggagggcttctccagacgtctcatctggcgaaggcaatgtgcatgcccttgcgttcatatatgtcaacgctgagacgttgcagatgatcaaaaacgctcgatcgctaaccgaagcgaacggcgtcaaagatcttgtcgccatcgacgttccgccatttcgaaacgacttctcaagagcgctactccttcaagtgatcaacttgttgggaaacaaccgaaatgccgatgacgatcttagtcacttcatagcagttgctctcccaaacagcgcccgctctaagatcctaaccacggcaccgttcgaaggaagcttgtcagaaaacttcagggggttcccgatcactcgtgaaggaaatgtggcatgtgaagtgctagcctatgggaataacttgatgcccaaggcctgctccgattcctttccaaccgtggatcttctttatgactatggcaagttcttcgagagttgcgcggccgatggacgtatcggttattttcctgaaggcgttagcaaacctaaagtggctataattggcgcaggcatttccgggctcgttgcagcgagcgaactacttcatgcaggggtagacgatgttacggtgtatgaggcgagtgatcggcttggaggaaagctatggtcacacggatttaagagtgctccaaatgtgatagccgagatgggggccatgcgttttccgcgaagtgaatcatgcttgttcttctatctcaaaaagcacggactggactccgttggtctgttcccgaatccgggaagtgtcgataccgcattgttctacaggggccgtcaatatatctggaaagcgggagaggagccaccggagctgtttcgtcgtgtgcaccatggatggcgcgcatttttgcaagatggctatctccatgatggagtcatgttggcgtcaccgttagcaattgttgacgccttgaagttagggcatctacagcaggcgcatggcttctggcaatcttggctcacatattttgagcgagagtctttctcttctggcatcgaaaaaatgttcttgggcaatcatcctccggggggtgaacaatggaattccctagatgacttggatcttttcaaagcgctgggtattggatccggcggattcggccctgtatttgaaagtgggtttatcgagatccttcgcttagtcgtcaacgggtatgaggataacgtgcggctgagttacgaaggaatttctgagctgcctcataggatcgcctcacaggtaattaacggcagatctattcgcgagcgtacaattcacgttcaagtcgagcagattgatagagaggaggataaaataaatatcaagatcaaaggaggaaaggttgaggtctatgatcgagtactggttacatccgggtttgcgaacatcgaaatgcgccatctcctgacatcaagcaacgcattcttccatgcagatgtaagccatgcaatagggaacagtcatatgactggtgcgtcaaaactgttcttgctgactaacgaaaaattctggctacaacatcatttgccatcgtgcatactcaccaccggcgttgcaaaggcagtttattgcttagactatgatccgcgagatccaagcggcaaaggactggtgttgataagctatacttgggaggatgactcacataagctcctagccgtccccgacaaaagagaaaggttcgcatcgctgcagcgcgatattgggagggcattcccagattttgccaagcacctaactcctgcagacgggaactatgatgataatatcgttcaacatgattggctgactgatccccacgctggcggagcgtttaaactgaaccgcagaggcaacgacgtatattcagaaaggcttttctttcagccctttgacgtaatgcatcccgcggacgataagggactttacttggccggttgtagctgttccttcaccggagggtgggttgatggtgccattcagaccgcatgcaacgctacgtgtgcgatcatttatggttcgggaggaaccctcaaagaaggtaatccactggcgcacgcttggaagcggtataggtatcaagcgtgataatgcaacagttagaataattagtttgccctagccggtattccttggtgttccaatagggttccgaagccaataggcgaaaaagctgacttttcagtcccttttattattcaattcgcttcggtccaagcataattgtaacgctacgtgatagaaaaatggaaattgacagattacttacttaaattaatataatctattaatatcgtcaagctaaaaacatgtaatacgtaaatatatggaaactttatgtctgaaaagaccacattattattgatcgtaatacactgaactggtcataacagggaaggctaactgcaacatatcctataaatactcagtgaaaatggccgctccccaatgttaagccatttttgcggtcgggctaagcgctcgtccgtgtctcccctggcccgagtgtcggctctccatcagcggcctcatcatctgtcgctgacaccggtggccccaatttcaaatcgaggaaagacgatgccctcgccggcaaacgtcgactggtggcattctccgcgaacttggtgaacccataagccacgacatcatagtcgcggtctcccgtcgcctggcggataagaaaggggcacaggacctcgtcgccatagatgtccactgctcgtgcctcgtaccaggaaacaaacaaagtgctggaaaaaatagcaacgaagcagtccatatctgattctttggtttggcggcgtcgccaagcaaggttgtggaccctagccatctctccgcgtgatagttcacttcgatatggctgaatagatgtcgcgactgccgcctccgtcccaaccaagaagcgccgattaaacagcagttcctgaatcttctcgcaggaaacatagatgaataaatattgctgcctctcaagcgctaggtccaatgggtcgtgcgctggggaatggtagcatacttttcgcgtaaggatttctgcattgattttgagttgattaactggatatctggcttcaaccatgttgagaaccctctcggcgaaagccttctgaaaacgcattatctcaccacgaaaggactggttgtagctatcgaaggcatcttgaagctctctgagcagtgttgtcgcatcttgggaatggcagaggttacgcggcggaaagtatggacgaattaggagccgcgagcccatagtattgctgaggtgggaatgtttttttgggccatgcagcatctatccaatttaagaacggcagaaatgacagccgcagaagcgcgctacagtacttggtcgggaaaacgacgttgtaagtctggtagcagtctaaatctggtcaagaaaagtgatatcacatcgacaaggcatgccgaaaacctggataatcagcaagtggctgtaaaggaaatatggtaaaattaggcgaatgaccgaatgtattgatgtcaggcatcgaactttgagccatttcctacattagggacacgtagtccgggctgaatgtgaaataaaagacctttatttgaacattgtacaggaatagtgttgaaaaagtgaaagatgtctcaagctccactaagtaaaggtgttgccgtttgatcgcggtataaagaatctgattccactttaagtttggtttattacgcggacgggatggtgattaaccgtgattgttgaatatctagttcactatttaaaaaatgttctgaagtagtatgcttactttcgtcaaagcgcaacgcgtccactaacagccgccttgctgccaccaagtcgtgactcacgagcacggaggtgtgtggccacgtaattctatagccgacgggagtcccttactaatatctcgagtcagcccggaattactatttcgtcgcgttgctgctcaagcattccaaggcgagcttatttagtgtgatgatgttacccgtcgtatctatcaaatatagctccgagataacttagggcaggttgatattaatgtttaaatagatagagatctcttattcagcgtcacaattttcttctgtgtcaaaaggatttctgttttcgtttatctagcgtcaaatagaacaaaacataagaacagaatgaggaacgtaataactgttattcaggtgttgataacgtgattgatgaaataatacatatataactgcaatatacggactgtcgcaggtcgagagatgacaccggaagtgatatcttaatgagccaaaggatagactcgcccagggtgagacctaggtccgccttagcacggcctccctagctatattggtaaattcaggcgcaagggctttccaaacggccagagctacggctctggacggtggagagactggttgatcgaaaagttggctgaccgctccaatttcccaattatggaggccggctcgttcaaaagacgtcaacgaagcagctcacccgtgctccaacgatgtgggtatgcatcgcacgcaggcttctattggcgagcatcagacccatatgcctgagagaaccggccggcttcatcttccgacgcaatggcttgtgtgttcacaagcgcttcttcggaccagctctgaattgccaagcaaggagagcggtataaatggtggaagttgagtgctggcgtgactcaccctcaagattagtggggcagttggcttttattgctattgggtcatttcctgggcgtgcacggaaacctaacaaaggtagtaatcgtgccagtagtggggcaggagaatattatgcatagctgtcagcatatttgttcgtgatttttaattggaaagtgaagcgaagattcccagtatgctgccaaattggatcgcactcacgcgcttggtgtgcttttaaaattcgggtgtctctaaagtgctttttcttatcgttgatgcgttcaataaatttaactcactttaggaaggctttctacaattatctcaccgcaaaaatgaaactccttaaatcgcagaatgaggccgcgtttgacatgttaaatatttaacttcacaaataatccgaacagcgtatgtataaaagtgacaaaacgaaataaaagaaagattaaagttggttattaaataacaattaaacgagcatggtcactggttccgcagcaccaagcacgaaaatggaaaatcgacctagtcctgatcttctgccgaagcattcgtcgatccatctcactgccgataaaaggagctccccttaggctgggtgacaattgtagtagtcaaactttcccatgtgtagcagcggatccagcattgttttcccggtggcctccgccagggcgggtgcccagggcttcaaaaaggcttcgcagatcattggtccgacaatcgctccaatttggggatcaatgccagacatatcaaagcccgttgtctcgatgacctgaaagcttatctcgccctctttgaatcgcatgtcgaagaaggtcttcacatccaacatttgaggtctgctggcatcatcagggattattagaatgtagtggctccgcttggctgtgcggacagtctccacaaaactgtggaagaaatcggcaccatccactgtatggatttcaaacccaaacctctcctgtaggacgcacagcccgaacgcatgaggaacaatccctgcgcatcccgaggcgatgaaatagagtggatgatcgtcggcgaatcttgcagcaaacgctattccaggctggacgcctttttccgcggccttaaacaaggcagctggaagtacctgcagagatgaaataagagccggaagcagtgcccagttctctctttcgttcagaataccaccaataagagacagcatcagcatatggatagcttggaaagcttgagttgttatccccgtggagaatgtttgatgaccgaaggacgcgagttttgagtttgcagatgccgtgaacacgactgacttgcaagccttgtccttcaagaacgcagcggcttcgacagtttccggcgtcatcccggactttgaagacaacaccacaagtgtcgtcggatcattcaccattgacgggttggcgcgcatgaggttcacgaaagttgcagaggcatatgcttcatatcggaggtttcgtccgacctggtcagtatatcgcttcaaactcctcgcgatcgccagacctgccccggcagagacgaacaggacgctgctgatactcgacgccgtggcgcgtccaaatttggcgactgtctcgagctgttggagcgtcgcgcgcaactgcccagacatctcaatcgcgctggtagatgaaggtgcatacagcaaatccattgtgctgtatcgagccggcgttctagcggaagttgaatggaagtgtggtttgtttcagaaaactggatgctgactggtccgtgtcagaggcgagctgacttatttatgccattcagcgggcggatcagacgtcgttgtcgttatttggggtaggtgcaccaaccttgctgagatattggttaccgtgtgggcccctctttgaatacatggaactgcgaggtgattggcatgtcaggttacgtcatcgcttacgcatcgccaaagtggcaaggaaataagagagaaaatagacttggtgtcatttagcaggacggatcagaagtcattgattgcggtttggtgcaccaactttgggcctacgacgttggtaccttaggctgcgtcagctatcacgcgctgcccgatattaaaaggcactcgccaaaatccggtcatctctatctcaacaaaccctctctacggtctttcattttacaatgcccctccctcgcgcgtaccttggtactgcccagccaccagccagtgtcaaggagttctacttcgtccgccatggtgcaaccgatctcaacgagaaagaaatgcacttgcaaggtgaaaaacattggggtgtgcagggcgccggcacgaacatcggtctcaatggaactggcaaacgccaagcggttctcgccggcaacgttctccgcaaacttcctatcggcagcgtcgtctgctcgccgcttttacgcgcaatacagacggctttgatcgccaatattggattcctctgctttgacatcgacgaggacctcaaagagcgggactttggcaagcatgagggtgggtatggaccactgaagatgttcgaggacaattaccccgattgtgaagacaccgaaatgttctctctccgcgtggcaaaggccctcactcatgccaagaacgaaaacacccttttcgtctcccatggaggcgtgctcagggttatcgctgcacttctcggcgtggaccttactaaggagcatacgaataacggacgtgttcttcatttccggcggggcttttcgcactggacggtagaaattcatcaaagcccggtgatcttggtcagcggttcaaaccgcggcgtcggcaaagccatcgccgaagacctgattgcgcacggctatcgcctcagcctcggcgcccggaaagtcaaagaccttgaagttgctttcggaccgcaagacgaatggctgcattatgcccgtttcgatgccgaggatcacggtaccatggcggcatgggtgaccgccgccgtcgagaaattcggaaggatcgacggtctcgttaacaatgctggctacggggaacctgtaaatcttgacaaacatgtggattatcagcggttccatctgcaatggtacattaactgcgtggctccgctgcgaatgacagagctctgcctacctcatctctatgagactggatctggccgaatcgtcaacatcaactctatgtcaggacagcgcgtgctgaatcctttggtcggttacaacatgacgaagcatgcactgggaggcctcaccaaaacaactcaacacgttggctgggaccgcggtgtgcgggcgatagacatctgccctggctttgttgccaccgatatgagtgcctggactgacctgattgcaagtaaggacatgatccagcccgaggacatagccaaactcgttcgcgaggcaattgagcgccccaaccgtgcgtacgtgccgagaagtgaagtgatgtgcattaaggaagcaacccgttgacatcgaatcgttcagagagcgtccgaagttttgtttttgcttatgtattgttgtcgtttctcaaaatatttcagcgcaatgtttttaatttcatatcgtgatgtttgtaatttgtttcattaattaatgtttgtgtagttcgaaaatagacaaacatatcaataatatattgattcttaatataaggtattaagaccacaacattgtataatttattgaattaataacgaagaacataacggggcttcaaagaattgtgacgtgcgcggatgtcggcgggctcaggcgacgaccgttcttctttcctcagatgttcctgccaagatcaaacggcgtgagcacctcatatccggtttcgctcacgaggaccgtgtcaccgaaacgcgcgccgccgatgccctggacatagacgccgggttcaatgctaaggacattacccacctctagtaccgtctgagagccggccttcagctcgattccgtcccaatcggagtaaccgatcccccgccccgtccgatgcaggaagggggcctcccaaccgctacgcttgattactgccactgcggccgcgtggatctcgcctgccgttactcctggacgcagcgctgccaaagcggctgactgagcttcccgcgcgacatcgataacctttcgcaagtttgcaggcaaaggcttcgaaccaatgggaaccggtcgatcgaaacaagctgcgtggccacggaacgtctggccgcaaaggcaaatctgcgcgatagcgccatcctgcatgatacggcccccgccggaaggatggcatcgggctgtgcgatcggccccgctgcccaccatattcaattggtgcggccagaaccgtggcagttcctcatcttcagctaacaactctccatttcgctcaatggcggcagtaacggaggcaagcgtgaccttccattcggggatgcccggagcgatagcattgcggcaggctagaaattgctcacgtacgatgtcacagctttgtctgatggcagcgatccccgccgcatccttgcaggcccagagctcttgcagcatcggtgttacgtccttgatgtgttctgcgccaagcgcctgcctgactaactcgacattggcgcccgaggtacaattgaagtccaaaccgatcaggcctgggtttggcgcgatccctctcgtatattgagcaagcgcatcttgatttgtcatgggagcagctatcggtccttcccattcaacccattccacagccacaggcgtcttgcagcgcgccgatatttcccgcgcttcactgcggggtgcgacgaaggccggtttgccgtactgttgcagaacaaaccagacaggcctgccgaccggcaaaccccataatccggcaaaatagttatggaaatccgggccggacaaggcaagaacatcgatgcctgcccgtttcatggcggtctgcgcaccttgcaggcgcgtttggtacacctcatcggagggcgaatcgttgacgcgcattgcgcagtttggtgtcggatcggggccccgaggcgattgggaatatattaaatttcgtaaggctttttgctaagttattgatttgctcgtccgaggttggggtagggtcctatttatgtccttcagcgggaagggcgatacttccgagaacatgatgtccacaacgagccacaatttccgctccaatgtcagcgttacattcggcgcttaccaaggaagcagccgcgttaataatgtgggcccccggctctttcacatgagcgagctgacacatagtttggacgccagttgttgctgcttgattatatataattttggccaagtgcagcgtttaataaatcgtgtgacaggatatatcttgtggtcaggtagataaatttgtgtggaggtatgtttgtttaggacggcggtgatgatggcttgcgccttacgtcccgaaagcagtccacgaagacaattgcaatatcggctgtcttccattcccttcgtggcatcttgtcaacgcgcctcgggagctcagtcgccgacgtttcgcgagttcggtatgcaaccccgaccttgcgaagaaccgcttacggaaccgcgctctatgagaaccgccgggagaagagtttccttgggtggggctgaagtctcgccctttaagcgggcgatcaggtcttctgtggcagccgtcgcgagatccctgacaggttgcgaaatcacggtcaatggcggcgttatagcggatgtccagtcggcgtcgtcaaagcagataagagagacatcatcgggaatcgaaagatccatttcccgaagaactccaaggagaacgagggctacggagctgtctgtggccaaaaaagcggtaggtctgttcggggaaatgcagagcgcacgcacctggtcggcgagattttttgtgtcccagccgccgagaacgataaggttaggagaaatctttatttgggcatcgtgcagcgcggcccgataaccatcgatacgttcccgaacggacgaaatcaggtactgctgctccccttgggcgggggcgttagacactaaggcaatactacgatggcctcgcccagtgagcgacgttaccgcctcgtgggctgcacggaaattgtcgaccgcaaaagtgttggcgtgaagaacagggacccgcctgtcaagaaggaccactgggcagcctctctccgatgcgctaatgagatgctccacctcgctgcttgacgttggagagattatcaatccatcgactcgcttagccagaagaacgcgaacagcgtcccgctccagctcgatatcctcatcggtcgtcgctaggatcacgacgaaaccgtgcgcaccggcggtgtccgtaatagcccgaatagcccgcgcaaaatagagattctcaatgtccgctataaccacaccgatcgttttgctacggccggtcgccatgctctgcgcgagatgattgggcctgtaagccaagctcttcgcggcatccgcaacgagttcgcgcgtcttttcgcggacatagccgtaaccgccaagtacccttgcagcggttgcccttgagacgcccgcaacgcgtgcaacgtcggcgattgtcggagcagcgcccgcgcgatcgttgtctttcatgagctgctcgttcccaaagggaggttcttggcgggtgccattttcgagttccttgtcttcctgcacgaaatagctagctcccctcccgcggacctctgcctcagcactattctgttccggttccgccctatgacgccctaatctgtctcgatcaatcgcgcggcagaaggccggcgtttagcgccggccagatacaacgctcctaccgcaagtgcggagcgagcaattctaagtcggcttcactcagcctatcgctcgcgttattacgctggtgccaatacggataaagcaacggtggaatgctgacgtcgtcgagccgctttcgttcttcttccgatagtttcaattctgcggcggccagattatccttgaactgggcctcggttcgcccgccgataatgacggaggtgacgaccttgcggccaattaaccaggctagcgccacctgagctgcggagacgcctcggccttcggcaatcgacactagtgtatcaacgatcttccacaggcggttttcgtcgcgaatcggcggctctttccagccggcaaactggcggctaccttccggcgccgactggttgcgccgatgtttgccagaaagcagaccgcccgcgagcgggctccagacgagtacgccgaggccttggtctacggaaatcggtagcagctcatattcggcatcgcgagcttcgagggtatagtggatctgctgactaacaaagcgctggcgcttatctttctcactgactgcgagt

SEQ ID NO: 68 - DNA, 51500 bp, Agrobacterium rhizogenes
tggcaggatatattgtgatgtaaacagattagatatggacatgcgaagtcgttttaacgcatgctttatcgaatataaaatgtagatgggctaatgtggttttacgtcatgtgaataaaagttcagcattcgtttaataatatttcaatatcggtgtctagagacccgtggatttgtatagtcagcaccatgatatgaatctataaaatattgtatctccaattgcaattcaatcgatataagaaattaatacaagccgttcatatagtaaggttgccaatggcattcaataacgaccgtacagttgccgctatattaatctacgtgccatttcttaaataaagataggcgaatgactatcgaaaataaaacaattattaatgagtgaaaacgtattgcacaaataaagattcattatggttggctcaaattttggctctggtgctcgatgacgtcgagatgaggacagtagtgatcaacttggcggtcgataccttggttacgccactcccagagtgccatgtcgtcctccgagcggtctgagataacccagtcggcaattgctgctgcattgccgggcgttccccaaccacgacgaatatgctttcgttcatctaactcgcgtcgcactgccctcccagtcatgaagtcaaagccaaattctaccctctctccatttcccagctcagtcgagaaatcgtaacacctcgtggcagctgacagtttcagaaaggggcgtatccctcgaactccagggtcctctttcacatagttagcaaggcgtactgctgcataatctgcgttgaaggctctgatgactacaggatcctcggacaagcccaattgatcagggcgaaccctcgcgctcataatatgaattgcgacgacccttgcttcctgtcggagcatcgaatcaatccaagccttccctgcggcatagaggtcatcgactgcgatgtcatcaagatcgagtagctttgccaacctaggaagttcttgaggaaaaatcaccggcatgacagcaaccgtctctcgccagtcagttgccggactggcttccctaacgccatccacgaatgcctcaccgcttgcgtatttgaatgtgtaaaagagaaggaccactctttggcggtacttcggacgccggcttagccacgcggcaataatgtgggcctcaaactcacgaccatccaaaaatatagtcgcgcctggattgacctcgctggccttgtcgagaagaggttccaaaaagggaacggtgtctttcgtaatagtacttaaatctgtgagttcgccatgcgaaacctctcgaacgattatcggcgtatccctgacatcagctgaatgaaattctcggacgagtttgtcgggcaaagtggagacccgccacgtgttgaagtcgtgggaaacgatgggcacatcgtcgccggtgagtgcggcatcgagctcagagaggttccgcctgccaacctcaccgagagcagtcaacaacgaagtttcggtgcattcctgtatccctttacccagattatacatgccccggtgttcgataacttgaagaggcagtggctcctcaagatgttcaaggaggtggggtacagagtgccgggcgaggacctcatccaccgtgacaccaaccgggagatcccattcgagtttccactggggccagcatgtgcccgcgacggcgaaaggtttgcgctggcaaagaacccggctgctgcaggtggacctatccttacccatggcaatggggttttgctaaaaagtcaggcactttactgggcaattgatagggtgggattgcgttattaactgttctccagcgggaatctttatctttattgaaatgctaaagcacttagataaaatacagctgtaccgcaatataaaatagtaggataatgtaatatgtgtatcgagaatacgacaagctaatataatctagcgtcaaattgcaataatttaaatcaaaactactgatgaaataataaaagatggtcaatttttattggtaggagttgtcgaaagattcgacggacggccattacaatacataggtgcaagaagtaaaacaggaagggaaacggaaaacagtgctataaaaaagcgacagatcgcggcgatcactgactgcgatcgggaagaagctcgccaagttcaccgagaatagcagagagcgcatcctcatcgggtactacgaacacattcgtcccagagggctttgtttcagctgcgccaacccagaaagcaaggccattttccaagttgccgatggcggtcagcatgtctcgatcgttgctgccgtttccacaagcgatgtgaaggccgatcccgtgagagaggcccttgacgaaggtgaaatagcctttggattttccaactgtttcaacgggcactagatattgaccctctggcgcggcaaccaccttgaatttgcgagatgactggttgccgatgagcgaagaaagcatttctccggcttctttgtaagatttgtgagattcccacatttgacagccgtagaaatgccccatcggaatgttgcggattcccgggatgccaccaaatttgttctccatagccgcgtgaacggcttgccagttgggcagggagaaagaatcgaagcgatcatctttgtagatcgtgaccattccatcatttccctggaatccgatattttcaatggcgctgaaaactgaccttgcgatttcttcgcattcccgtgcggatgtgagcaattgataatggcccttgcaggcgatcctggtcaaattggcgatgatgttgatggcaggattaatatcccaacactggtgatttcgatcttgcttaaaggtggtaccatcgccgtcgaaggcgagcagggcccggagagatgaatcggcaagactgcgtcggacccgctccgcggcgtcgggaatgaggctgataagagacatatccaaaggtgtttgtgggtaacgggctgctcaatgaagccttaaatgcaacgcaacatatgtaaggatgagttgacttattggagagagaaataggaatgagctggccagccattatcaacgtggggccatgctgacaatgtttacgtgaaaggctcaactacctcgaagcagacctctatattcgttgactttattactgaacaagaagttgcttgccactcattttcttaaatcttgccctttctgcgcctcgctatcatgcccgccaacgacgcgacatgcgctgccgcgattgccttccccgagggcaactggaaggaagaacttgatgcgctccgcaccttgtgtgaccccgtcgaggtggttaaggtcgcagtcggcagaggtcttagcggcatatgtaatgttgttgcagcaatgaatcccacaaaggtgaggggcctcggcgatgtcatcgggcagatgccggctcttaatcaccgtattgctgccgccgccggcgaaactccggtgcgagaccttggaataggttaccagtgcgcaatctgccaccccgacatagccagtgcgatgttagccacttctgaggggatcagccacgttctccgtgaaaggattgagaaagaagttgaccgggacattggagaaggcgccaccgtctgcattttcgttcagccgagaatgagctccaagggctctccagtttctgtccatttcaccctccagtttgcgagatctggaactcttgtcgatgccagaatgatggagagttacaatttcatgaaaggcaatggcacagtgaccgcaccggatttgaaaagtcattggaagaagcacggtattgacaggccaggcccacgtccgcccacgtccaagtttgaactcctcttcgccgctgtccccgacaacagtaaacttgccgccaccgattttacccatctcggccctgtcgagcgtgataaggaactactcggcagcacggtattcgggattgccgctaagaaacctggtacgatcgtttatccgtgcgaaaaggttctctgtttggaggtcgacgtccaggcgcatcgcgccctggaagtacttcaccgccttggggaacaggcttatagcaatggccgtggcactagcttcggtcttcacaccggtccgtcctcttgccttaatctttccgccgccgcgctcgctacatttttcaaacgctcggatctctgttcccttccattgagtgatgcttttgtccttttctgcgaccacgccactggcgcctacagcgccaagaaagatggccttccgatcactgccttctcccccacgagcaccaatcagttcgaactcgtagagcctcaggtcgtcaaggcatatgttctcggacttttcgacgcgccgacgatggttacgccccgcgacaaaacgcgagccagcttctgcagccaatatgtacgtttccgtgaaccgcatccctgtgaagagttcaatgaaattggagttttgatcctcgatgctgctgctaaaatgctcgaacgttatgcaaaatttctagaagatggtggaagagatgatgatgaaatggcgaacataatagatgtatttgggttttgtcttaactagtggattgattgaaacaaaggagtccgagttgggattccctttcggtcttcgtcgtgcaacgatatcgtatgcgtacaggtatcacatttaacgttgctgcggcggaccgagcccgcttggaagcgattgttgcagctccaacttctgctcagaagcacgtgtggcgagcgaagatcatcttgatgagcagtgatggctcgggaacggtcgcgatcatggaggcaaccggtaaatccaaaacctgtgtctggcgctggcaggagcgcttcatgactgagggcgtcgatggccttttgcacgacaagagcagaccgcccggcattgcgccgcttgatggcgaactcgttgagcgtgtcgtcgcactgacgcttgagacgcctcaacaggaagcaacgcactggactgttcgtgcgatggccaaggccgttgggattgcagcctcttcggttgtgaagatctggcacgagcatggtcttgcgccgcatcgctggcgctctttcaaactgtcgaacgacaaggcctttgccgagaagcttcacgacgtcgttggcctctacgtctcgccaccggcccatgccattgtcctgtccgtcgatgagaagagccagatccaggcactcgatcggacgcaaccgggactccccttgaagaaagggcgcgccggcacaatgacccacgattacaagcgccacggcaccaccaccctatttgccgccctcaacatcctcgacggctcggtgatcggccgaaacatgcagcgtcaccggcatcaggagttcatccgttttctcaacgccatcgaggcggaactgccaaaggacaaggccgtccacgtcattctcgacaattacgcgacccataagcagccgaaggtccgcgcctggctggcaaggcatccgcgctggaccttccacttcgtcccaacatcatgttcatggctgaacgccgtcgagggattcttcgctaaattgacacgtcgacgtctgaagcacggtgtctttcattccgtcgttgacctccaggccaccatcaaccgcttcgtcagagagcataatcaggaaccaaagccgttcatctggagagcagatccagacgagatcattgcagccgtcaaacgtgggcaccaagcgttggaatcaatccactagcgtatgaacagtaataagaaaatcccgattgtgaatagtcccaatttcaaatgtgtccgtgtgtaatttgcgtgtcttcagttgaatttcctttaataatatcaaatattcaattgtgaaaagttgtattggttcaggttcaagctttccgaatttgttgaattttattccctgttttcaatttgttgacttgtttgggagacaccttttttgtgtttcgtgaacatgtcaccccttcggtatacattagcctacaaagtaaataacgttgataaatgtcactcatgttgtaataaaattgagcttattatgtataaccagaccctgtgttaatctaattacaaagaaattcatcattctcccaagcaatcctgagtagctgcgtgatggatcttccatatcagcgcccacgtttcaccccgtttgccgtcacccatccacgtagtggagtcaacctgaaccgtgcaatttctcaggcctttgtctgctatgatcagttctgcgaacggctcttgcgatatcagcaaagctggacggattgggtgttcgaccacggatttgcagaagccattgaagacgtggcgctggtgttccaggttgcaccttgccttcatggcccccgaataggcgcgctcgaagtgttgatacctcgtcgcacccaggtcttcatttatatgtcgaacaaccaattgcagcgctttgttgcacaccagtgcattgctcaacttggcgacgccgtgcttgcttgcatgatcccgccctacgcgagtgacctctcgctgcaggaaatggctcgggcgcacaacagattttgcccaggcagttacacgaggtccgcagacgtacagtgctttatcgccatccaactcagcagccgattcgttgaggagggcacatgtaacgtgcacgggcgaaatggcttaaaaagaacctgccgcttctttcgtcgccctgctgagttcttcagccgttatgacatcgttgccattgggccggtgctcttccatgatgaactggattgcccagcaaactgcaatgagcctctttcctgctttgacctgcggtacgactatcaggttttcctccaggagtgcgatgcccatgatggtgtggggcattatccggaaggcgcaccactacctagtgttgccatcgtaggaggcgggctgtctggccttgttgctgccacagaactacttggcgctggcgtcaaggaaatcactcttttcgataccgttgatgagatccgtagttttggggcatcgccgatgccaaacggcgacgctcaccaggccttgacgtcgttcggtgtcatgcctttctccgccaaccaactttgcctgtcatactatctggataagtttagaattccgtccagccttcgttttccttgtgccggcaacgaccacacagcactatatttccgccagaaacgctacgcatggcacgcggggcaagctccgccggggatatttcagcgggtacatgtcggatggaagacactactctaccaagggtgtgaacggaatggcaggagactgatggctccgatggatatctctttcatgttgaaagagcgtcgtcgtgatgaagcctcagaagcacggcagctttggctccgagagttcggaaaattcactttccatgccgttttggtcgagatcttcagctgtggtaattcgagtcctggtggcaaggcatggcaaacaccccatgatttcgaggctttcgggatactgaggttgggatacggccgagtttcgtcctattacaacgtgttgttttcaacgatcctggactggattatcaatggctacgaggaggaccagcatctttctattggtggggttcaacttttgcaggctctgatgcgcattgaaatattccagaaaagccatgcgaaagcacgactctgttttgatcccgtgcgtggaatagccaaggagggcgggagattgaaggtatgcttgaaacacggtcattcgcgtgtttttgaccaggtcatcattggcggcagtgctgaggccgctacagttgataacagactggccggggatgagacttccttcagctacaatatcgaacccgccgtcggaaactcgtctgccgctgtcaattcagcactcttcatggtcacgaagcaaaagttttgggttaactccggcatcccagcagtgatatggaccgatgggcttgtccgtgagctgtgttgcattgacatcgaatcgccagctggagagggccttgtcgtttttcactatgctttggatgactatctatcccggccgatcgagcatcatgacaagaagggacggtgcttggaattggtcagggagcttgctgctgcctttcctgaactggcttgtcacctggtcccagtcaacgaagactacgaacgatatgtcttcgacgaccacctaacggatggttttaagggagctttgtggagggaaaattctctggaaaaaggtcagtatatccaggatctgcctgggaataattttcctattggggatcacgggggagcctatctgattgaccgtgacgactgcgtcaccggagcctcgttcgaggagcaggtgaaggcgggcatcaaagcggcctgcgccgtcatccgcagcaccggcgggacgctctcttcactccaaccggtggactggaataaaaaatagaaatttcctgattaagttatagtcaatgtactattgcgtgttaatcccgtaggtatgcaagctgcaccggcagcatcataatttgatgttccatcaataaattaaggtgcccgttcattgtgtattacattatgtatgtttatcaaaaatataatcgaagtccattttaagtctgatattaattggaattccaaacgattccttgatgcctatcttcgctatgattgtatggtaataaagtctccacatctcccgaaaaatgctttcgtgatttacttgtctctcacgtgctttcgcatcttgacagccaaaagtgggcaacttgagaagagtattaactggccacgcaactcgagatattcccactaaccccaatgacgtcattgcactcgtcacgggtagcagccccacttgcctttgccactttattaattctttggcccactggccattaattggcacctacatatattagtggagaagataaagtgtcactatcgtttcctgttcaattttgaattttgcaaggatttcatgttgtcaactacacagcttgaaaggaaatccgcaatcaacggagaaacgtcaacatctcgacaaaaaaagaatgcttcatcattgcgtagactgcatattgaccgctcctttcggcgctgggcctgcttttactgttgcctagcgttcggacagccaccagagaatgggctatatagatcctttcatcaaaccaaaacattactaagatcatgctgtaacgcttcaatacggtgagtgtggttgtaggttcaattattactatttttgaagctgtgtatttccctttttctaatatgcacctatttcatgtttcagaatggaattagccggactaaacgtcgccggcatggcccagaccttcggagtattatcgctcgtctgttctaagcttgttaggcgtgcaaaggccaagaggaaggccaaacgggtatccccgggcgaacgcgaccatcttgctgagccagccaatctgagcaccactcctttggccatgacttcccaagcccgaccgggacgttcaacgacccgcgagttgctgcgaagggaccctttgtcgccggacgtgaaaattcagacctacgggattaatacgcatttcgaaacaaacctacgggattaatacgcacgtggctggcggtcttcgattcatttccacgccggagatgatatcgaatatgttctgttaagttaaaataagctgcgagccatggcgcgattgtcctgttttattaatatagtactttaacgtctctttagagcgtttgtgtaatgtcgtgaaaatgttttatgtcaaatgtactgttgaactataatattataagtccaggtgtgtcgttgttgttgatactgcaatatatgtgtagtagattagatagtcatatgagcatgtgctgtttttggcaaaattcagcagcaggatcaacacagaagaaaatatttagtacaagaaaataggtcaacacattacaacgtacgctacaactcccaaggttctgtgtcacagactgcgggagggtacatagaacttatgacaaactcatagataaaggttgcctgcagggggagttcaagtcggctttaggcttctttcttcaggtttactgcagcaggcttcatgacgccctcctcgccttcctgatcaggccccgagagtcgcagggttaggtctggctccggtgaggaggcggccggacgtgatatcccgagggcatttttggtgaattgtgtggtgccgcaagctacaacatcataggggcggttttcagtccctcgccgcagaaagaaggtgcaagctacctctctcccgtaaacgttggtcacttttaactccagcaagtgaatgaacaaggaacttgcgaaaatggcgatgaagcattctaaatcaggttcctccgtgcggctgtgcggccaagcaaggttgtgaacacggagcatctcctggagggcgagctcgctccgatatggttgaatcgttgtcgccagcacggcctccattccaaatgtaatggattgttccttcagcactttctgcatcttctcgcgagaaagatagacaaatacatgttggtcgttttctcgagccagatccggctgactaacaaacataggaggatgatagcagactttgttcttcaagagctcagctagttgtttaagtatatatatcggtggagagttttccttcaaatctagcactgcaagagcccatcgtttctggaaatgcaggaggggtttgctatagtcacggctatagattgcaaaagcaaatcggatcccctcgaataggtttatctggctccatgctggagtgagatctactggttgaaatcgtggaaggaatagcaatttgggatccattgtgatgtgagttggatagttacgaaaaaggcaagtgccagggccatttaaaatacggcgtcggaaactggcgccaatcagacacagtctctggtcgggaaagccagaggtagtttggcaacaatcacatcaagatcgatgcgcaagacacgggaggccttaaaatctggatcaagcgaaaatactgcatgcgtgatcgttcatgggttcatagtactgggtttgctttttcttgtcgtgttgtttggccttagcgaaaggatgtcaaaaaaggatgcccataattgggaggagtggggtaaagcttaaagttggcccgctattggatttcgcgaaagcggcattggcaaacgtgaagattgctgcattcaagatactttttctattttctggttaagatgtaaagtattgccacaatcatattaattactaacattgtatatgtaatatagtgcggaaattatctatgccaaaatgatgtattaataatagcaataataatatgtgttaatctttttcaatcgggaatacgtttaagcgattatcgtgttgaataaattattccaaaaggaaatacatggttttggagaacctgctatagatatatgccaaatttacactagtttagtgggtgcaaaactattatctctgtttctgagtttaataaaaaataaataagcagggcgaatagcagttagcctaagaaggaatggtggccatgtacgtgcttttaagagaccctataataaattgccagctgtgttgctttggtgccgacaggcctaacgtggggtttagcttgacaaagtagcgcctttccgcagcataaataaaggtaggcgggtgcgtcccattattaaaggaaaaagcaaaagctgagattccatagaccacaaaccaccattattggaggacagaacctattccctcacgtgggtcgctagctttaaacctaataagtaaaaacaattaaaagcaggcaggtgtcccttctatattcgcacaacgaggcgacgtggagcatcgacagccgcatccattaattaataaatttgtggacctatacctaactcaaatatttttattatttgctccaatacgctaagagctctggattataaatagtttggatgcttcgagttatgggtacaagcaacctgtttcctactttgttaacatggctgaagacgacctgtgttctctctttttcaagctcaaagtggaggatgtgacaagcagcgatgagctagctagacacatgaagaacgcctcaaatgagcgtaaacccttgatcgagccgggtgagaatcaatcgatggatattgacgaagaaggagggtcggtgggccacgggctgctgtacctctacgtcgactgcccgacgatgatgctctgcttctatggagggtccttgccttacaattggatgcaaggcgcactcctcaccaaccttcccccgtaccagcatgatgtgactctcgatgaggtcaatagagggctcaggcaagcatcaggttttttcggttacgcggatcctatgcggagcgcctacttcgctgcattttctttccctgggcgtgtcatcaagctgaatgagcagatggagctaacttcgacaaagggaaagtgtctgacattcgacctctatgccagcacccagcttaggttcgaacctggtgagttggtgaggcatggcgagtgcaagtttgcaatcggctaatggttagtcgatgggctgacgagtttgatgtcaggagaagctgagtgtgtcacttgtttccctttaagaagtattaatgtaataaaaatcaagatctggtttaataactggatacttgatttcatcgcgctttttttgaatatggagtgcaccccatttcaccggacaagtcggctagattgatttagccctgatgaactgccgaggggaagccatcttgagcgcggaatggggatggatttcgttgtagtcctcgatccatccgtcgcctgcggcgaacatcacccgtcagcaattcaacgtgtcgatagtcgttagacataagcctgtcctcaagcctgtgcttgagcctttctgcttatgccgactgtccggtcgaaatggggggcagttcagaataaatgtttgttgtcttgactttaagatatcctttgaaatttgcgttattcgtatttcgcttttggttatttccaaaagactttgctcagtaagatcaaacgtttgtatttctccgagccacaatatttgacctatatgcactggcccacgcgccgcaatagatgaaaattgccaaaattagctatcggtcttctgaaaagaagggccgacatgttttcatagaccatgcaaagtcatactacctgaaactgataaataacgacaaagaaagtagcctatttaaaagtcgctatagcatgaattcaacacaaggaaaccaaaagtcggaaggaagactttaatcccggattatttggacatgataggagctatggggcaacgtgtcattttcatgagtgttgaatgattttctgtagcaaatagaaaacgttttttaaaacgatgtggccttggagtaatcagcggaagaaatggtcatgctcagataatttccgttgctgacctcgcaaccaacccctttaaatacctctgctgcccatgcattttgccaagttaacctaaagtggcagctgaatggctcgttattgcagtggtggctctcaacggcttcatgtcgatgattttcgttggatcaaggagcccactcgactgaaggctcagcttattaatgtggtggagacctacaaggctgcacaaacagagacgttaaagtactatatatcatctgcaactgagcgtgtggctcatgtggaggcagccgaggtcaacaatgcggaaatggagctgcatcctgctgggttgaagtaccctctgtccttcgtctttacctccctggccgtggctacagcctgcaaggagaacaagcatctcttgtgcgaggagcatttggagggggacttgatatcgtgcgtcgttcctccctatcagacaaatgtctcactcgctgctttaagggagctccacaattccatttcgggaggagggtaccaggaacaagcagacatggattattttgtggcgatcatcccaaatgataatttcgactatcagagctgcgaaatcgacacacgaagttgcggtaaaggactttgcaagatttatagtagggaactgggagggcagcctctagcttatgacgccatactggcaatcggcaaggtgctgctgctggaatagatagtgggccgctgatccgagtttgattttgtcgtattatgttacgtgaactttttatcatgcatgtttcgcttatgctcccgagtgtcggccatgttgttgtgttaaaataaaaggctgatgttaagtcctattgtaaaatacctttatagattaaatatatatagtataacttctgtatgccgtcgatgagcggttatatgattgtaatctatacgttgttgcaatcaatcgtattacagtgagccgtgcttaatgaaataaacatcatgttaaatgtctatttattcaatcaacatgcgatgacaataatcaaaaggggaaacgtaataacattgcggtggatacagcgtttattgggagatccgcgggccgatacacttaaataacatagacagaatttgagagagcacgcaggttgtagccaagttgagcgacttgccggtagcacggaagctaagctcaggtgttacaaatagacaggcgtcgaggcgacgagcacgacgaccttgccggacattgcggtcgcagggggctcaaagcggttggcttgtaacggaccttgtgtttcttgttgtagctttcatcgagcataaccattgggacggttgctgaacaacggtaacgcacttttttcacgggagcgaggtagaagaacatatttccccgtcggcagccggcggtgagcatgccaattcctaagggattcaatggactcgtgcgaacggtgagcatgccgttctgaccgtcggtgcccaatcagcaggccactcccaacatgttttccaagtccttaaaaccagtctttatagcattgatctcccagcaatctttattgaagtcgattttaatattcaaaagaagattttagtggaaagggaatataatcgcgtggccgaagaagagccttcaaaaatcagaatccactaggataaacaataatatctgaaaagcattgaatttgggttaggcacgagaggctgacgcggatgccactcgattgctagtggaaggattcccttttttctagcgtatcgaattcaccgtttcactatatgttttcctgattggttgatctgcgggaccaccattgactgccactaatatcgaaagtgggtctgcttcgattatgatgctttgtgagaggttctcttcccaatgcatgcaagctggcagattcggatactctcaatagagatcttatttcgcgtctcaaaaagttcccagaaatcaacaaaggggagggcaggtcctttaaatacgttgcagctgtcctttaaaatagaagagaatttacagctggaggcacagaccactaaactgcgaaagtaagcatggcagatgagttggagcgtcaattggaagccatttctctcattacagtcctgggtccggatgtgaaggctgagcttgaggcggagctacgagactactgcgaagatctcgacttctggaaaagccacggtttaccggtggcggatctcgatcagactgtgactgtcgacaagcttctatacatgtatatggatcgggcaacagcagacctgtgtgtgaagaatcgctgcctcgtttgcaacagtggcaattcagccgcaaaagtaacctcgcttccaccataccttgcaggcgtgacaagcgccgaggcctatgagaaactcaactccattgttgatgggagtgtcgccccccaatctcgtgggcctccctgctattttgtggcgttcctgcccagcagctgtttcgagaaaaccagtgagatatcggtgcgcacagtggacggcgagtgtggccccttcgatgtctttacccggcagcgtcagccacaggatcagagtgatatgttttttaaatatgaaggagttgtatgtgctggaaagagtgtatttatgtaagaattatcttttatagcctgtgttacgtttgaacccggtccgcgcggtattgttttcaataaatggtatgtgcggaggatataattggtctttcattggtgtgatttacgtgtaacgcggataataataaagtaaattacaaaagagaaacgcataattttattccagaatgattgcgagaaacgatgaaaatacatgaaaatgcatattgtcgccagggaaggatggcgccgaaataaacgaaactgagccaatacagtgacttgccaagcgagtttgatcctaccaaattcgcgcaaattaatgcccgtgttccatcgggccagcgagtttattcaaaagagtttcgtacacgtgggcggcgacggcaacgtcaatgcttgctagccctaccggcgagaagttggccggccccttccatgccttgaggtcattcatcaaggcctcgtcatcgagaatttcggtgtagttcttgatcccatcgcgcttgccgtgttgggtcagtttcataccgcgcctagaatagtagagggcaacggcatcaacgttgcgggcttccatcgcaacaaggtcatcggcgacaattagaccatccgcagataggacatgctcaatgtaatccggcggcatgtcatcaataccgagtgacaaagtgactgcgttgggggcgatttcagcggcttcgaataccggttttccgtagttggtcgccatgatgacgaattgagaatatggcaaaaggctacgatcgccgacagcttcaaggctaaaggttacgcaatcacgtaacttttcgacgagctcgaaattggatttcttaccgcggctgagcactgctaccttacgaattctcttagcggcaccatagttaagtgagagaattacagcttcggcaacttttccagccccaaacaagaaaacgtcgatgtcctctctgccttgcaacagcaggtttacgcatgctagcgagaaccaacccgttcttccattagaaattgccacgccctctaccgacataaggagcgtcccggacaccttgtcgcgcaggaaaatatcggagtgctggagcggctttccggtagcggcgttggttggcgcgaagtggatgtctttggtgccggaatatcttccgaaatagccaatgagtgctccttcagtccatccaggaacattcttgttgaacgttaggtaagctttgacatgtccggcttttcctgcggcaaacacctcccaataggacttgagagcttcgtcaacaaatgctggtgtgatctggatatcgaggtttgatagtgcagattcagtccagtgtacctcgcaaagttgtttggccatctgccttgtaggtgcgaattttctctgctcaaattgttgaggttagcggatttgtaaacgcgtttatatgggctgcttggagggtacttttggattaatttttttctgccagcgcattctgacgcggcaccgctttggaaagtgcgctgtgggtccgcgttttctacaataatgtgccgatccggtcagaaagtatatggatgagttgtgccagcctcaccaacgtgctgcaggcccatcatgactacttcaatgttaatgggggtaatgaataaataggcgaaattgggttcacggtgggcccagggaatataatattgccgcagaggtagtcggatgccaaggcccgcaactaatagttcacgaacaaattcattgtagtgggcggccaactccaaaaccaattgccagttattgtattgcaatacatatatgagtattcggatacaactaatttcattaaataatattttaagtgtggacagaatagcgcctaataaatttgcgaatgttgtccaattgacgtttttataggtaactcgataaatcgtgcttttgtgatattctgatgcggacaatatacatttaaacataaagatataagttattgaggcatttatgtatattacaatagtggggtacatttttcacagatgctgtcacccatgaaatattggcaaaatactcttaaaatatgcaagaaactaaagaggatgcatgggttgggctgtaggtacatggatgcaaatgctgttttgcaataagtcatatagtctcgtctgttgagtgaggcccattcaatcagcaagtaggactgaggctgcatgatcgacatatttttgaaccacagttttggcaagtttttcatacaaatgcacggctacggccaaatcgtagcttgcaagtccaactgctgaaaagttagccggcccgttccaagaaattagcctttgcataaggactggatcgcggagaacttcagagtagttcctgatcccattgtccctgccgtgttttgttagctttaaatggcgtcttgaatagtgcagcgccaacgagtcgatattacgtgtttccatcgcatccatatcatctgccaccacgatgccactcagcttcaacacgtgatcaaaatagtcagctggcaattcgtcaattccaagcgtcaatgtaacggcattgtctgtgatctccttcatctcaaagacgggcttgtttgaattcgtcgccgtaattatgaacttggatttgctgagatatgctcgattgttaacagccttgagtgaaatcttgacttccggctgaagcctttgcaccaactcatggtttgactggttgcagcggctgagaatcgcgattcgttgaattcttccagatgctcccgaattgagggcgaggatgatggcctcggcaactttacctgctccgaataggaagacattgatctggcttcggccctgcaataggagattcaggcatgctagtgccagccaaccagttctcctctccgatatagccaccccatcaacagagaagagacgtctacctgtgaaacgattgcgaagcacaacgtcgatgtgagaagtcggttctttgtatctcgcgtttgacggattagaatggatgcttttcacacccgaatagtcgccgacgaaacccaccagagctccctccgtacagccctctcgatcaagtggaacgaagaccttgttgtggccgagccgcccttcagcaaagaggtgccaataatctttcaaggcatccgcgacgagttccggtgtaatgtatattccaaaagccgatagagattcctctgtccaacattgctcgtgtatttgatcggccatgtttgtgtttgatcagcctcctttcgaaaatttcttgagtttcgaataattctaaaatcgaaggacgattaatagtgccataccaagacaagaagggtaggtgggccatcaatccacaagcctagcacattttgctgtctgctcatgcaaggtatccaatggaagcctggattggttagccgaacttggtgggttcaattggagcgggcaggtcactttttgtctctcaaataactgaaactaagttttgttatttggtatgtgtttgtctgttctgccgaaggtgcccgaatttgcgcaaattcctttctaaaaaggcttacatctagcaaaaggtgagccctgtgcatcccagcatttggacaaagcgcgccaattcggacagcgactggctgcgttggaggctcggatctcaaagaatagaaaagagttatgatcatgttcagaaccgccaattttgtgcggtatgagctctttgatgaaagtaatggtttcaaaaaagcaacatcgtgggtgaaaggtacctacatatcttcacagacaataactactgttgctgtttgctgattgactgacaggatatatgttcctgtcatgtttgttcaattgttcaattgttcaattgttcaattgttcaattgttaatgtataagttcgtgatgaaggatggttgttttaaaaatagtatgtttgactgaggttaagtcactcacgttttgcacatcgacggaccgtaagcattctttcggtaagaccgaagctcgtcccagataataggccccgtggagggaggccttgtatgggccggccgatgggcgtgctgagccgagtacggcgacgcctgcggcgattgcgcgggcggcactgcgcgcaggggcacgggttcatacgaggacgagcgtaaggggcatagagctttccgcccgtcgggtttcagccatattgcttgattgcggccgactggaatgcagccaggtcgtgctcgccggcggcgcctggtcgagcggcatgctgcgcacctcagtgttcggcttcctcagctcacggttactgtgtcggcgctaagaaccgaggcctttgatggcggacctggccttttcaatcaagggatgctgattttccatccgtaagcgtctcgacggtggttacaccgtcggcttcggcgcgacgatgagaaccgaaatcgtcagcgatagctttcgttttctgtcggattatttcctcctgatgcgagaggaatggctttctatccggctgccggcgggtgcgcgcgtccggattgaccctcccgttcgttgctacttggctcgagtgacgaaatagcacgcctggtgccgctgtatcatgtccatcgggctcacaggagattgcgctcgtagcgcgttggtgtcactcaccaacacgcgtcgtcgcaccaaattggggaggatggtagcggaatcctaaaatcctaaaaccataccgacgcgtcacggcgctcgtgacccctgcgagcgacgcggcactctctcacctgatccgtgctgcggttgctcaatacgcaatgagcattgtcacggttctcagggtaaacggcaatctcttcgtcatgcgggcgtggatgctatcaccgttagaaagggcctgcccccatggtgggtctctaaggttcagtctgagaaggggcagccagagcggcactgtttgaagagcagtctgaaccgctcagatcgctcgcatcgatgcttgggcggcgtcctgcagtgcgcgttcgagccgtagcaccgcgggacgctgagcacgtcctgcaggctgctcaagatagtagttccccggaccaggagtttttgcgaccagcggacagacctctagtccgagggacgccccaagaggaccacagacaggaagatgtccgatagcaagtcccagcccctggctaaccatcatcagggcgagcggcgtggtatcgactacttcgagtctaagattgcgcccctgcatggctccgaaattgtggttgaggagcgcggtccatcccatggcatgtgagacgacgtcaaacagcttgaaggaaagaatgtcctcgaggctgtggatcgatgcgagctcctcgcgccgacacataacgacatgcgacagtctcatcagccacatgggatgacgaaccaagtgcggttcctctccaaagcggattatcaagtccggttcggcattacgttgcgaaccatccatgagaaggccgacctggatcgacgggttctcggcctcgaaggcggcgagaaccttcggaagccaactcatcgacatcaattggcttgcaagaagcgtgactttttcgacgcgttggcgtccgaacatcgcctgcgccttgctttcgatcgatcccagcgacacctgcaccgtcggaaggaagtcagctccgtccagcgtgagagtgatgcggtttgctgttcgctcaaagaggggacgaccaaggtgggtttcgagcgcgagaacctgctggctcaccgccgcggaggacatgtttagttccttgcccgcgcgggcgaagctctggttccgggcagccgcctcaaaaacgcgcaaccaatttagcgaagggataaggcttggggtcatcgtcggagcataagtaaaacttgcggtaagcgcaattagataccgagtctacagatgctgaaccgggtggcataactctttcgggaactgcccatcaaaaacaagggaacaactacatgttaaaccgcagaatgctactctcgctcgctgccttgccgctcctcgcaggtccggccctttctgacagtctccccgatcatatcaccgtggcaactgagggcgcatacgcgccgtggaactataccaatgcggacggcacgctcgccggctatgagatcgacctgaccaagcttctctgtgagcgcatgaaggtgaagtgcgacattgtcgctcaggaatggagcggcatcattcctggactgacagtcggaaagtacgatgcgatcattgcatccatgggcgtcaccgaggagcgcaagaaggtcgtcgcgttctcgaagccctatgccaaagctcctaacggcttcctcacatccagcgacaatgccatgaaggacctgccggatgcgggcaagtcatacgatctggcgaagtcaccgaaggatgccgaagcggccttagaaaccctgaaatcgaaggtatccggcaagatcgtcggcgtgcagacggggtcgacggcagcgacgttcgcttcacagtacctcaagggagcggacatccgtgaatatccttcattcgagcagctaagtcttgagctcaatgcgggccgcatcgatctggccgttgccaacgtaaccgcgttcaaggccgccattgatcagagcaagggaacgctggtctttgcaggaccaaccttctcgggcggcgtcttgggacttggtacaaccaacgtggcacttcgtcctaaggacgaggcactgaaaaaggcgttcgacgacgccattacgtccatagacaaggacggttcgaacaaggctcttaccgaaaagtggtttggcgtcgacatctcgacgcaagagtaagacggctgtccctcctcgcgaatgaggcgggatttctcccgcgcgctgaagcgccgtgggcattccaatcttctgtacaggtgacggcatgttcacgcccatcgggtcctccgaggcaacgatcactattttcttcgagaacgagcccattcgggcccgtcaaggcgagacggtggctgcatgtctgcttcgagccggtgttcgatacttcaggacgacacccgtctctggatcgaagcgacttccgtactgcatgatcggccactgtttcgactgtctggtcgagatcgatggaatcggaagtcgccaggcatgcctttcccaggtccaagatgggatgaagctgcgagtccagtcgggcgcggcggccatcgacgggaactccgaccaatgaacgcgatgatcgacaatcagccttccaagtatgcggtctcgcctcctatcgacgccgacgtcgtggtgatcggtgcaggccccgccggcatgtccgcggccattgaacttgctacggctggctgtcgggtcattgttgtcgacatgcagccgtctccaggcggccagatattccgtgcggtagaggcgaaccatgccgcccgcccgaacacggagagtctgcttgccgcgctcggtccggcttacgcggccggcttcgaactcgttgagagatttcggtccactcccggcatcgactatcgaccggagaccacggtctgggaactgcgcgccgacggtaccgtgggctggctgcgggacatgtccgcgggctatctccgggcgtcgtgcgtggtcctcgcaaacggcgcgatggagcggccggttccgtttccaggttggacattgcccggtgtcctgactgcgggtgccgtgcaaacgctcctcaaggcggggcgcctgaaacctgaaggtaggattgttctggcgggagccggacctttgatcatgctgctggccgatcaactccgccgtctgggtgtacgacccgtactcatcgcgcgcaccgacacgttcggagacaagttcaacgccctttccaaactcaggatcgccgcgcttccagctctcggcaaagggctggggtggattgccagcctcaagatggccgggatacctatgctcactggcatttcaaaccttcgcgcgcatggcgtcgacgtcgtcgagtcagtcagcattgacgtgggcggcaagaacatgacggtgccttgcgacatgctcgtggtccacgatggcgtcattccgtccactgacctcgcacacggtgcgggcctggcgatggaatggcttcatggagactcgagctggaggcctaaaacgtcgtccgaaggactggccgaggcggcgcccggtccggcgctcacttccgggccgtgccggattttcgtctcgggcgatgcccgtggcatcggtggcgcagacgctgccatggcgcacggccgccacgtcgccgcatccatcatccgcgatctcggaaagtccatctcgaccaagcacggatccgcggcaaaagcacttagtatcgcgatggccggccgacccttcatcgatgccgcgtttcctcccggtctcgccgggcgcctcccggaggacgataccatcgtctgtcgatgcgaagagctcgatgccgggacgctgcggaaggcgatccgcgaaggcgcacgcgacatgaaccttgtgcgcggcattcttcgatgcggaatggggccctgccaaggccgtcactgttcgataacgctcgcgcgactactggcagaggaaggcgtcacggatcggccgcatcttccatttcgggccagaccgccgcttcggccgattccgctgggcgcacttgcgaacctctcggggctcgatccggaactcgcgcatattgtctccctcgatgacaagcctaaagcgagcatggaggacgacgcccatgaatgagaaggtgcgcgacttcgtcattatcggagggggattgcagggatgttcaatcgccttctttctcgctcgcgccgggaggcgggtcacgatcgtggagaagagcattccaggcagacatgcctccggcgttaacgccggcgggctgcggctcctgcttagagatgctcgtgaatacccgctttcgctccgtgcgatggaaatgtgggagaacctcgaccagttcgtcggaggcccggctgccgcggctgccgaggtctgtctcggaacgtcccagatcgcccttgcggtcgatcgcgaagaaatgcagtgggcggaatcccgatcgaaggacatgatccgtcgaggcatcgtcacagaggagcttgtcgacgcagcggagctgcatcgccttcttccaggtctgacgaactcggcgctcgggggactgatttccaggcgcgatggccatgcaaatccagctagcgcggctagcgcgttccggcttgcagcagaaggagcaggcgtggagatctgggaaggctgcaacatgcgcggcatgtctccgacgtcgtcaggatggcgcacggagacggatcgcggcgcgatcgaatccgacgtcgtcgtaaactgcgcaggcgcctggggttccaagatcgcggcgtccgtcgacgaggaactgcctgtcaacgtcatggcgctttcaatgatggtgacgacgcgcgtcgcacctttcgtgaagcccgtggtcatcgggatcgaccggccgctctcgttcaagcagagcgccgtcggatctcttgtcatcgggggcgggatttcgggcaagccatgtctggacgacgacacctcgttcatcgtgatggatcgcatggcgtccagtgcggccgcgacggtcgcggccttcccagcgctcgcgaacatttcggtcgtccgaagctggacaggtctcgaaggcctgacgccggatggcgttccctacattagtcccagcgcccgtcatcccggactgtggcatgtcttcggcttctgcggacatggcttccaactttcgccggccgttggggaaacagtggcgcggtctttgacaaccggatccctcgatccaagactggctccattcgccgcggatcgtttcgccaaagatacaacgcgggcgaaggaggctctgcgatgaacccagacatgatcgacctaataggttttgggccgcagggctgggggctacctttgttgaaagcggcaggggtcactctcgcggccgccgcatgcggttttcttctgggtagtcttcttggcgtgatgggatcgatcctgaagctgtccaagcatgtggcgctcagaggcatcggaagcttctatacaacggtgttccgtggcgttcctgaaatccttgtggtgtacctgttctacttcggaggcagccttgccctcacgaagcttatgaatgtcggagggatgaccggcttcttctcgctgcccggtttcgccaccggtgtcatggcggtgggtataatctccggagcatatcagaccgaagcgtttcgcgccgcctacctgcgactcgacaggggacagatcgaagctgggctctccacgggaatgtcgaactttctgcttcttcgaaggatcatcgcaccgcagaccctgcgtttcgcgcttccggccctcggcaacatctggcagtccgcgctcaaggagacgtcgcttctctcggtcatcggtcttgttgaactgctccgccaggccgggaccgccgccggatcgacgcaccagccacttctattctacgccgttgccgcggggatgttcctgatcataggaagatccaccggcttcttcattcggcggttcgagaacactctagctagaccgtggaggcgctgatcgtggattggcaattcatgtccgaagtcctgcaacaacttcttgcaggactcccccttacaatacaattgactgctatctcacttgcggcggggttcgttttggccgcggtggttttcggcgccacgaacagctcggtgcctccacttcgctggcttgcgctgctccacatcgagctgtttcgcgggacgccgctgcttctgcagatatttctgatttactacggtctgggacagatcccattgctccggcactccgtcctttggcccttccttcgcgaaccctattggtgtgcaatcgtagcgcttgccctaaacacctcggcctacacggcagagatcatccgaggcgcgatccaggctgtcccgcaaggagagatcgaagcggcacgcgcatgcggaatgtccggattgatcctgcgtcgtcggatcatctggccgatcgcccttcggcagggtcttccggtttatggcagcgaggtgatccagatgatcaaagcaacgtcgcttgcaagtatcgtgacgctgaacgaggtgactgggatcacgtacaagctggtctcttccacctatagggtcgtcgagatcttcgccgtcgccggggcgatatatcttgctttgaatttccttgtgagcgccggcttcatgctgatcgaacgctcacttcacgcccatctcgcgcatcggcgcgcctgatgacaaccatggagaaactcatggccaccacaaatagcagcgtggctgcctcccaagcgagtggagccgcagcgattgcggtggagggtctgcacaagcacttcggcgacctcgaagtcttgaaaggcatcgacttcgacgccggcgacggcgaagtcatttccattctgggagcgtctggctccgggaagtccacctttcttcggtgtctaaatcttttggaacttccctctgctggacggctgagcattctcggtgaggaagtgcggttgcgctcgaactcaacgggactccacatcgctgaccggaagcaggtcgatcggctccgcacccaggtcgcgatggtcttccaaaacttctgtctctggcagcatatgaccgtgctggaaaatcttctggaagcgccggtgcacgtccagaatagaaaacgcgcggaagttcgcgatgaggcggaggctatgctcgaacgcgtgggcatgaaggagcgcatgaaggcatacccggcacagctctcgggggggcagcagcagcgcgcggcgatcgcacgtgcgctagtcatgaagccgaaagcgctgctgttcgacgagcctactagcgcgctcgatcccgaacttgtcggcgaggtcctaaaggtaatgagggatctcgcctcggaagggcgcacgatggtgatcgtcacccacgagatggcgttcgctcgtgacgtgtcaagccgaatcctcttcctggaaaaggggcgcatcgccgctgagggtgcgccgaaagatctttttgggggcggtgtgaacgagcgcttcgatcagttcatctcgcgatttagtcaaggctgaagcaattacagaaagcctaacagcgttcccctcgaaggtacatagaggactaatggcagaacaaaggaatagccttatgatccagcggtttgagactggcaagcgaatgagccgggtggtcacgcacaacggggtcgcctatttagccggattgacggccgatgacctcgctgaggacattgcgggtcagacgaggcaagtgctcgcaaaaactgaagcaagactcgccagcgccggaaccgacaaatcccgattgttatcagccacgatctggctccgccatattaacgacttcgatccaatgaaccgggtttgggaagagtggattgatcctgccaacccgccgacgcgagcgacggctgagtgcaggcttgccgacgacgatatcttaatcgaggtcatctttaccgctgcgtgctgattggcttcctgtcttcagcggatgcggtgatcgattcggcgcagcctggtgagggaacagtctcgacaatcatcgcggttctaatctgcagagagttgttaaatcaggtcagtggcatgcaatagcagcgagattgcgttatggaaccgtggatactaccgccatttgaaaagacctgccttgggtggattgcccagggaaagacagtatcggacatcgctctgcttgagggtaagacggtcgcggaaatccagcattacctggagcgagctgtgttattgctcgatgtaatatctatagcggaggctgtcgaaaaaatgaaacgcctcgacgaacatgcaccggcgtccgccacggatgcctgatccgttcgcagattgatggtgggacaagctgaggcgctacatatgatcagtctcacccacttcagataggagccattgctggaagaggtcgacaaccgagctcgtccgtttttcttctggtcggacaacataataagcgttctctgtcgacatggctaaatttgcgatcggagccagtgcgcccgatcgtacctcgtcttcaatcaaatacgtcggcgatagcgctaccccaagtcctgccacggcagctgccgtgatcatggagaattggtcgaagcggagtccgacgaacgcgttttcaacagacagatcgtgaactcggcagtattctgcccaaagcttcggtctcgttgtgaggtgtaacagcggagcttgcgagaggaaatcagacgtctcacccttaagccgatcggcaaggcgagggcaggcaacaggcagcaccttttcgtgacaaagaaacgtggacacgccgccggcccaagtcggttgaccgaaatgaattgccaggtcgaaattgtcctcttcgaagctgaacggcttcgcgcgagattccacagtaatcgccacgtcctgatgatgggcaagaaaactgcccagccgtggcacaagccactttgcgccgaaagtgggaagggtcgcaattcttagggacgccttcatctgtccagcagcaacggctccgatcataaatcgctccgaacgggcgagcagctccttgacctctgggagcaaacgtcgtcctgcctccgaaaggatcaccctccgccggatgcgttcgaaaagcttcaatcccgtttgctgctccagctcagatatctgacgacttaccgcgctctgggttagattgagttcctccgcggctctcgaaaagttctggtggcgagcggcacactcaaaagcttggagattaacaatgtccggaacaagggcccgccgcatatctattccattttcgcatcaagttagcagaaagtctcacagtacagggttgctatcgggccgtatagtgcatttcgagcatgaagtcctaccgttttcgaaggttgagcaaaatggcgaagcacgtcacgtcgagcgaaatccggtcgtctttttccgcggccatgtcggccatgtaccgcaccgaggttcccgcttacggaacgctcatggatctggtcgcccgcgtcaatgacgaagcgctttcagccgagccggaactcaggactcgtctcgaagcgaccgacaatctggagcgcatttccgaggagcgtcacggcgcgatccgcctcggaacggctgaagaactggcgatgatgcgccgcgtcttcgccgtcatgggcatgtatccggtcggctattacgatctgtcgaccgcgggcgttcccgttcattccaccgccttccggccggtaggcgacgcggcgctgaagcgcaatcccttccgcgtcttcacctcgctgctccgcctcgatctcattgtcgacgcgcagctgcgcgaggaagcggcaaagatccttgcgacgcgccgcatcttcaccgatgaggccatcgagctgacgacgaaggccgaagagcaaggcgggctgaccagggaagaagccgatcgcttcgtggctgcagtgctcgaaaccttccgctggcacgacaaggcgatcgtcgacgtcgcgatgtatcatcgtctgcatgacgcgcaccgcctgatcgccgacgtcgtgtccttcaaggggccgcatatcaaccacctgacaccgcgcacgctcgatatcgacaaggtgcagagcctgatgcccggctacggcatcgcccccaaggcagttgtcgagggtccgccgacccggcgctgcgccattctgctgcgtcagacatcgttcaaggcgctcgaagaaggcgttgccttttcggatggcaagggtggctggcagaccggctcgcatacggcgcgtttcggcgaaatcgagcagcgcggcatcgcgctgacgccgaagggccgcggtctctacgaccagcttctggaacagtcgcgcaaggtcgtccgcccggccgccgacggctcgaacgctgaggcctacgaggcagcgcttgccgccaccttcgaagcctttccggatgactgggtggcgatccgcgccgaggggctcggctatttcagctattcgctgaccgagaagggcatgaaggcatcgacggatgcggctgacatcgaaaccctggtttcagaaggtctcgtccagttcgacccgatcgtctacgaagacttcctgccggtcagcgctgccgggatcttccagtccaatctcggcgatggcgcgcagcaggaattcgttgccagccccaaccagcagcgcttcgagaccaatctcggcgccaaggttctcaacgaattcgatcactatgcagggattgagcaagcatcgatctacgactgcctttcgaggctctcgcgccgcccggcggctcagtaatcgtcaaacacggcagcaatccgcacattggagtccggcacatgaacatttccgtaaagtccccttcggtcctcgacgaagcacacgtcattctcgatcgtctcggcgtcgacaagtccgcctataccgatggcaccatggtttccttctcccccatcaccggcgagaagatcggcaagctgaagaccgtcgatgcgaaggacgcaggcgccgcgatcgaacaggcgcataccgccttccagacctggcgcctgacgcctggcccgaggcgtggcgaactcgtccgtctcctcggtgaagaactgcgtgccgccaaggccgatctcggccgcctcgtctcgatcgaagccggcaagatcccgtccgaaggcctcggcgaagtgcaggagatgatcgacatctgcgatttcgccgtcggtctttcccgccagctctacggcctgaccattgccaccgagcgccccggccaccggatgatggaaacctggcatccgctcggtgtcatcggcatcatctccgccttcaacttcccggtcgcggtctgggcctggaatgcggcgctggctctcgtctgcggcaacagcatagtctggaagccgtccgaaaagacgccgctgacggcgctggcatcgcaggcgatcctggaacgcgcccttaagcgcttcggcgacgcaccggagggcctgaccgccgttctgatcggcgaccgtaccatcggcgaagtcatggtcgatcatccgaaggttccgctggtttcggccaccggctcgacccgcatgggccgcgatgtcggcccgcgccttgccaagcgttttgcccgggccatcctcgaactcggcggcaacaatggcggcatcgtctgcccgtcggccgatctcgacatggctctacgcgccatcgccttcggcgccatgggcaccgccggccagcgctgcacgacgctgcgccgccttttcgtccacgacagcgtctatgaccagctggttccgcgcctcaagaaggcctaccagagtgtttctgtcggcaacccgttggaatccaccgcccttgtcggcccgctggtcgacaaggcagccttcgacggcatgcaaaaggcgcttgcggaagccgccaagtacggcggagctgttcatggcggacagcgcgtcgataccgacagtgagaacgcctattacgtcaagccggcgctggtcgaaatgccgaagcatgaaggcccggttctcgaagaaacctttgccccgatcctctatgtcatgaaatactccgactttgacggcgtcattgccgatcacaatgcggtcggcgcaggcctttcctcgtcgatcttcacgctcgacatacgcgaggcagagcgcttccttgccgccgacggctccgattgcggcattgccaacgttaatatcggcacatccggcgccgaaatcggcggggcgttcggcggcgaaaaggaaaccggcggcggtcgcgaatcaggctcggatgcctggcgcgcctacatgcgccgtgcgaccaacacgatcaactattcgaaggccctgcctttggcacagggcgtatccttcgacatcgcataaggtggacctgtcatgacgatttcagcgaaaatcgaggaggcggacttccggcccgcttcgcggatcgcatcggtcggcgtttcgaaaatcctccagatcggcgcgaaggcggccgccatgaagcgtgatggccatccggtcatcattctgggcgccggcgagcctgatttcgacacgcccgataacgtcaaggacgcggccaaaagggcgatcgatgcaggcgagacgaaatacaccgctctcgacggcacgcgggccctgaagaaggcgatcgtcgagaagttccgccgtgagaacggtgtcgattacacgaccgaggaagtcacggtctcgaccggcgccaagcagatcctgttcaacgccttcatggcgagcatcgatcccggtgacgaggtgatcatcccgacgccttactggacgtcctattccgatatcgtcgagatctgcggcggcgtttccgttctcattccctgcgatgcgaaggcggggttccgcctgcgggccgagcagcttgaaaaggcaatcacgccgaagacgcgctgggtgctcctcaactcgccgtccaacccctcgggcgctgcctacagcgccgaagactatcgcccgctgctcgacgtgcttttgcgccatccgcatgtctggctgatggtcgacgacatgtacgagcacatcgtctacgacggtttccacttcgtgacgcccgttgccatcgagccgcggctgaaggagcgcacgctcaccatcaatggcgtgtcgaaggcctacgcgatgaccggctggcgcatcggctatgccggcggccccaagccgctgatcaaggccatggcggtgatccagagccaggcgacctcctgcccctcctccgtcagccaggctgcttcggtcgaggcgctgaacgggccccaggacttcctgaagggccggcgtgatagcttccgccggcggcgcgatctcgtcgttgctgccctgaacgccatcgacggccttgactgccgcgtgccggagggagccttctacaccttctcgggctgcgccggcacgctgggcaaagcgacgccgagtggcaagaagatcgaaagcgatcaggacttcacggattacttgctcgaagacgcgcacgtggcggtcgtgcccggatcggccttcggtctctctcccttcttccgcatctcctacgcgacatcggaagcagaacttgtcgaagccctgggccgaataaaacgggcttgcgaagcattgcagtcctgatcgcaaagcccggacagaggtcgcattatagaacatgatcccacgtctccgctctgatcttgatacagtccttcccgaagctagcttcttcgaacgccttatggaggctggcttcacaggggacgttgaggtcggcgctgcttctcggacggttttttcgaccgataactccatctaccaaatggcaccggcgggaattgtctttccgaagggcgtcgaggatctgaagatcgtcgccacggtcctgtccgaacctgcttttagcagcgtaaccgtagcgccgcgtggtggaggcacaggcaccaacggtcagtcgctgacatccggggtcgtggtcgactgctcgcgccatatgaaccggattctggaaatcgatccggtccgaaaaatggctcgcgtcgaagcgggcgtcgtcaaggatcaactcaaccgcgcgctgaaacctcacggacttttcttcgccccagagctttctacatcgaaccgtgcaacgatcggcggcatggtctcgacagatgcgtgcggtcagggatcttgcgtctacggcaagacctcgaaccacgtcttgggtttgcacgtcgtcctgatggacggatccgagtggtggtcgcggcccttggacgatgccgggcttgccgatatcgtgagccgcgaggatcggatcggcgacatttaccgaaccgtcgaacggattggccgggagaagcgcgaccgtgtcgctgagatcttcccgaagctcaatcgatacatgaccggctacgatctcgcgcacatttgccaccccgacgggggctttgatcttaacgccatcctgtgtggctccgaggggacgttggtgatgatcgcggaggtagagctcaatcttttgccgatcccggcccatgccgccctgatcaacatccgctacggcgactttaactccgcgctggaggatgcacgtaccctcgccggcctcaaggtggcctccgtggaaacggtcgatgagaaggtgctcggcctcgccaagaccgacattgtatggaatggcatcgcctccttctttcccgaggatgaggaggggtccgcggatggcattaacatcgttgaagtgctcgccgatgatgcggcggagatggagcgcaagctaagcgagattacctcggctctcgacggaagtgcttctgcacgccaccgaggctacaccgtggcccgtggccatgccgacgtggaggcaatctggacgatgcgcaagcgcgcggtcggcctcctgggcaatgtggaaggacctgtgcggcccgtacctttcgtggaagataccgccgtgcccccggaaaatctcgcggcctatatccgcgaatttcggttgcttctcgatggcgccggcctttcgtatgggatgttcggccacgtcgatgccggtgttctgcatgtgcggccggcgcttgacttgacccgggaagatcaagtgccattggtgcgggacatcagcgacgccgttgtggcgctgacccgcaaatatggcggtgtgctctggggcgaacacggcaagggcgtgcgttcggaatatgtgccggagttttttggcgatctctatccaagccttcaggagataaagcggacctttgatccccaaaatcgtcttaatcccggaaagattgccaccccgggttctcagcccctactgaaaatagaccaagtcccacttcgaggagccgttgaccgcatcattggcaacgaaatccgtgccgccttcgacaatgccgctcattgcaatggcaacggtgcctgcttcgatttcaatgagacgagtccgatgtgcccatcgtacaaggccacgcgcgatcgacgtttttcgccaaaaggacgggccgccttgatgcgggaatggttgcggttgctcactgaaaacggacttgaccccaggcatgaggccgaacgcatccgccagacgcatccgctgctgggcctgccgatacggcttttcaacagtgtcgatccgcgaaatagaaatgacttttcacacgaggtccgcgccgtgatggacacctgcctcgcctgcaaggcgtgcgccggacagtgttcagtcaaggtgagtgtaccgtcgtttcgatccaaattcctcgaactctaccacgaccgatatctccggccgttgaaggatccactagttgcggccatcgaaacaacgctgccgtggatggcgcgggtgaggccgctctacaatttattggccgccacgagagcaggcaaacgaattctccgcgttgcggggctcacggctttgcccgtgcttcctcgcctttcccttcgccgcaaggcagcccgtctcggcattgcccttgctacacccgaccggctgggacgcttgtcgcctgaggacagacggcgcgcggtgataattgtacccgacgcattcacggctcatttcgatccgggggtcgcgctggctgctatcaacctggccaaaaaggcggggttcattccgtttctcaccgccacccatgtcaatggcaaagccctgcatgtgcatggctacctcaaccgcttcgagaaggtcgcggaaaaaacctcggcctatctgcaaagcatcgccggcttcgacattcccctcgtcggtctcgatccttcgatgacgctcgcctatcgtagtgagtaccagggagtaaccagtgccaagctgagcggccaggtgctcctgccacaggagtggctgtccgctaatctcggcgtgctggccgcaaaagctggaccttcacgggaacgacgctttcggttgatgatccattgcaccgagcgcacgaatgctcccgcatcgacctccgagtggaaagccgtcttcaaagccctcggtgtcgatcttgaaattatggatgccggctgctgcggcatggctgggacattcggtcacgagacccgcaatcgcagtatttccgaacggctttacatgatgagttggaagcaggaggtcgatacggccgatgggcgcaacgtgcttatggcaaccggctattcctgtcggtcccaggcgaaggaaatagatgcggtgcggattccacatccgttcgaagtgatcgacacgctcatcagttagatcgtctcccggaggtcgcaaaacaaaaacgcccggccgcgtttgcgggccgggcgtgacattgaagtctgggaattggcttagccagcgtccttcagccgcacagcctccggattatagacttgtccgaaccggttgttgaggaactcgccgagtgaaatcccctcctgccggacaaatcccttctggggaagtttgccgttcgccagcaaatcgaggacggtcgtgataccggccgcggtggtgatctggatggcgctcatcttcttgccggcgacgacgctggcatagactttgttcgcgtaggtttcctgcagataacggccgtccttccagccgcagacggtgacgaagatcacgacgacatcttgcatggtggcaggcagggcgttttcgaacagatccttgagtacgtcccgtcggttcttcaagttcaggtcgtttagaagcgctttgatgatggcttggtggccggggtaacggatcgtgcgatagttcatcgtccgcacccgtccttccagtgatttggccagtgtgcccaaaccgccggatgtgttgaatgcttcataggtcacgccgtcgagggagaactcttcgcgctcttccatggccggtacggtgacaagcttgccttcgacaactgcttcacagggctcaatatactcgttgatcagcccgtccgtactccaggtgagattgtagttcagcgcgttcgacggatattgcggcaacgccccgacccgcatgcgaacgctatcaaggctgtcgaaacgctttgccaggtcgttggcaacgatcgaaatgaagcctggtgcgagaccgcactgagggatgaaggcagtgctggcgttctcagccagttcttccacctttttggtcgtcgcgacgtcctcggtgagatcaagataatggacgccagcttcgagagcggcttcggcgactttgcccgtcagattgaaaggagctgccgacaggactgcaaactttccgctgaggacgtcaacgagagctttgccgtctgcaatgtcgacagtcgcaacagcaatcgaggggtgttgatcaaccttggccagttgcccttcgtccctatcagtaacgacaaccttgtaatcgccggtttccgcaagcatcagagcaatggctccgccaatcttacccgcgccgataaccactatttctttcatacaaatcccctgtgttctgtatataggatatttataaaaataaccggggattggtcgaatcatagcggcaaggtgggcattatgttatatatttttgtgcaaaaagacgactgcacttggtaatatgaaggggttccgcatgcaattgaccgaaagggatcgggagctcctgtcgttactcggcgaaaatgccagaacgcctgtggcgacgctcgcgaaaaagctttctctatccaggaccacagtgcaggctcgcttggagcgccttgagagagagggagttattgtcggctatggtgtaaggctatcgaatgaatattcctcgagcttggttcgagcccatattctgatcaccatagcgccgaaggcgctttcacaggtgacggcctcccttgggaaggtcacggccgttatcgctcttcattctgtgagtggcacttttgatttgattgcgattatcgaagccccttcgatttcagagctcgatcagttcatcgatcaaatcggcataattgaaggtgtcgagcggacgctctcttcgattattctttcaacacgcatttcacgctgaaagagcaagaggccacagccgtgcgcctgctgccacctttccgacgatgaccatgcagaacttacggcctctatgtcggtgtattccacccaccgacgcgccatttccgtgtgcattaagataatgctttccgccccatcggattgctgttctgacatggtatatcattacgacagccaatgtttggcggctcgtacgaatcatcaagcggtcaacctgtgctgtcaaccgtcacgatatgagcaagcaactcaaacgctttcctattcaccgcacgcgcgttgttggctgtttggcaggatatatgccaacgtaaaaatgagggcaatcgattgtactgaatcggattttcaagggtctggccaaaactattccgtgggcacctggcacacgccctggagtccggcccgtttccagttgagggttgtctacgcttagatgagaaggaaagttgtccaagacgaatcccagtgtcctattaccaatagccggcgctagtttgatttcagaataaagagaaattcgtcacaccaaatattagaagcaatgtttgattgaccatcatacttaagatgaacattccaaacacagttataatacgcattattattgacacaatataaaattataatgttgatattccttgaaatataatattacaatagataaagtagaggaaattatgtcagaaatttggtttggctctgcttacgacagagtcggacgatgcctaaagtctattgcttcttctatcgctagtccaattgctaacagacgttcatccgagcttgcagagccatcgatttccatgccaataggcagaccgttggaactaagagaaacgggaagacttaggcccggcaggcccgcattactgctgggatctacattccgcacgaagattttaaaggtatcggtcattgagccattgtgaatcaccgatagatcatggccaattggcttggctgtcaacggagctgttgggaaaagaattgcatctagctgatgcgccttgaagtaactgtggtaggccgcttggagtctcggtctgaaaaaacgtcgcgccagacaatactcgcttttggaaataagattatccgagagttgtgcattgagaatacttgcaacatccggactgcgaatcgctctgacaacctcagaaaaggaaacaccctctacgaagttctgaatataatgttcaagggacaacggaaattcgtagatggcagtcggaaagctgaccccttcattgtgatgcgctaaatcaggaatatctgcttcaacaaaagtaacatctttgcgtgccagaactctgataatcgtctcggctgctaaggcgacatcgggctccaggtcgttgtaaaagtaagcggttggcaagcctatacgcagccccttcaggcggaccgtttgattaaccggcggtctcccgcaaatgataccgtcaagaagaatcacgtccggaacattctgtgcgataacgccaggggtgtcccgggtggggcttaccggaactattccgtccgttggatatcgccccacggtaggacgaaaccccaccacgccgcacaaggcggccggtaaacggaccgacgctcccgtgtcagttccgacgccgcccagcatcaatcggccggccaccgcggcggccacacccccacttgatccccctgggatgagactagggttccacgggtttcgtacggcgcctgtggcggagttgttgctcgtgatcccaaaagacaattcgtgcatgtttcccgaagcgccaggcagtgccccagccgcgagaagttgtcgtgcaactccggcaggcgtcttgggtttgtggttctgtaagcctggcgtaccagcggtcgcggcgaacctgcctgtcgcaatattcgctttaaagcataggggaacgccagctaggccaacaccggcacctccgtgttgatcgattttgctggcagtccaccgtaggtgcgcccagtcggtttccagaaaggcgtttaaggatcttgctgcttcacagcgggctattatcgtttcgattaactcaaagcacgagtattttctttccctgagacatttaagcgtctcggtgatcgaggagagggtcaccattttcgttgtgctgagggaactgagatagatctcgccagagaaacgttcaatgatttttgcttggagtgaaaaaggcaaataattatagaggaaggaagtcagaaatggctgcgcagtagggccacttgtataagtgccggtcgaacactgctggtggaaagtcaaaagcgtgaagtattagttgaactctgttactaaattgagataaatgggatattttattcgaaagtactgtttgagatctagcgacaataataatgtcatcttatgagattgcatggcaatatggatctaatatttggcataaatagatggtggttttgtctccacttttaaaccttcacagcgttaccctaacacctcttaattgcgtacactcctttcaaccgcatcaatggctggatcctccttcacattgccatcaactggctcagcgccccttgatatgatgcttatcgatgattcagatctgctgcaattgggtctccagcaggtattctcgaagcggtacacagagacaccgcagtcacgctacaaactgaccaggagggcttctccagacgtctcatctggcgaaggcaatgtgcatgcccttgcgttcatatatgtcaacgctgagacgttgcagatgatcaaaaacgctcgatcgctaaccgaagcgaacggcgtcaaagatcttgtcgccatcgacgttccgccatttcgaaacgacttctcaagagcgctactccttcaagtgatcaacttgttgggaaacaaccgaaatgccgatgacgatcttagtcacttcatagcagttgctctcccaaacagcgcccgctctaagatcctaaccacggcaccgttcgaaggaagcttgtcagaaaacttcagggggttcccgatcactcgtgaaggaaatgtggcatgtgaagtgctagcctatgggaataacttgatgcccaaggcctgctccgattcctttccaaccgtggatcttctttatgactatggcaagttcttcgagagttgcgcggccgatggacgtatcggttattttcctgaaggcgttagcaaacctaaagtggctataattggcgcaggcatttccgggctcgttgcagcgagcgaactacttcatgcaggggtagacgatgttacggtgtatgaggcgagtgatcggcttggaggaaagctatggtcacacggatttaagagtgctccaaatgtgatagccgagatgggggccatgcgttttccgcgaagtgaatcatgcttgttcttctatctcaaaaagcacggactggactccgttggtctgttcccgaatccgggaagtgtcgataccgcattgttctacaggggccgtcaatatatctggaaagcgggagaggagccaccggagctgtttcgtcgtgtgcaccatggatggcgcgcatttttgcaagatggctatctccatgatggagtcatgttggcgtcaccgttagcaattgttgacgccttgaagttagggcatctacagcaggcgcatggcttctggcaatcttggctcacatattttgagcgagagtctttctcttctggcatcgaaaaaatgttcttgggcaatcatcctccggggggtgaacaatggaattccctagatgacttggatcttttcaaagcgctgggtattggatccggcggattcggccctgtatttgaaagtgggtttatcgagatccttcgcttagtcgtcaacgggtatgaggataacgtgcggctgagttacgaaggaatttctgagctgcctcataggatcgcctcacaggtaattaacggcagatctattcgcgagcgtacaattcacgttcaagtcgagcagattgatagagaggaggataaaataaatatcaagatcaaaggaggaaaggttgaggtctatgatcgagtactggttacatccgggtttgcgaacatcgaaatgcgccatctcctgacatcaagcaacgcattcttccatgcagatgtaagccatgcaatagggaacagtcatatgactggtgcgtcaaaactgttcttgctgactaacgaaaaattctggctacaacatcatttgccatcgtgcatactcaccaccggcgttgcaaaggcagtttattgcttagactatgatccgcgagatccaagcggcaaaggactggtgttgataagctatacttgggaggatgactcacataagctcctagccgtccccgacaaaagagaaaggttcgcatcgctgcagcgcgatattgggagggcattcccagattttgccaagcacctaactcctgcagacgggaactatgatgataatatcgttcaacatgattggctgactgatccccacgctggcggagcgtttaaactgaaccgcagaggcaacgacgtatattcagaaaggcttttctttcagccctttgacgtaatgcatcccgcggacgataagggactttacttggccggttgtagctgttccttcaccggagggtgggttgatggtgccattcagaccgcatgcaacgctacgtgtgcgatcatttatggttcgggaggaaccctcaaagaaggtaatccactggcgcacgcttggaagcggtataggtatcaagcgtgataatgcaacagttagaataattagtttgccctagccggtattccttggtgttccaatagggttccgaagccaataggcgaaaaagctgacttttcagtcccttttattattcaattcgcttcggtccaagcataattgtaacgctacgtgatagaaaaatggaaattgacagattacttacttaaattaatataatctattaatatcgtcaagctaaaaacatgtaatacgtaaatatatggaaactttatgtctgaaaagaccacattattattgatcgtaatacactgaactggtcataacagggaaggctaactgcaacatatcctataaatactcagtgaaaatggccgctccccaatgttaagccatttttgcggtcgggctaagcgctcgtccgtgtctcccctggcccgagtgtcggctctccatcagcggcctcatcatctgtcgctgacaccggtggccccaatttcaaatcgaggaaagacgatgccctcgccggcaaacgtcgactggtggcattctccgcgaacttggtgaacccataagccacgacatcatagtcgcggtctcccgtcgcctggcggataagaaaggggcacaggacctcgtcgccatagatgtccactgctcgtgcctcgtaccaggaaacaaacaaagtgctggaaaaaatagcaacgaagcagtccatatctgattctttggtttggcggcgtcgccaagcaaggttgtggaccctagccatctctccgcgtgatagttcacttcgatatggctgaatagatgtcgcgactgccgcctccgtcccaaccaagaagcgccgattaaacagcagttcctgaatcttctcgcaggaaacatagatgaataaatattgctgcctctcaagcgctaggtccaatgggtcgtgcgctggggaatggtagcatacttttcgcgtaaggatttctgcattgattttgagttgattaactggatatctggcttcaaccatgttgagaaccctctcggcgaaagccttctgaaaacgcattatctcaccacgaaaggactggttgtagctatcgaaggcatcttgaagctctctgagcagtgttgtcgcatcttgggaatggcagaggttacgcggcggaaagtatggacgaattaggagccgcgagcccatagtattgctgaggtgggaatgtttttttgggccatgcagcatctatccaatttaagaacggcagaaatgacagccgcagaagcgcgctacagtacttggtcgggaaaacgacgttgtaagtctggtagcagtctaaatctggtcaagaaaagtgatatcacatcgacaaggcatgccgaaaacctggataatcagcaagtggctgtaaaggaaatatggtaaaattaggcgaatgaccgaatgtattgatgtcaggcatcgaactttgagccatttcctacattagggacacgtagtccgggctgaatgtgaaataaaagacctttatttgaacattgtacaggaatagtgttgaaaaagtgaaagatgtctcaagctccactaagtaaaggtgttgccgtttgatcgcggtataaagaatctgattccactttaagtttggtttattacgcggacgggatggtgattaaccgtgattgttgaatatctagttcactatttaaaaaatgttctgaagtagtatgcttactttcgtcaaagcgcaacgcgtccactaacagccgccttgctgccaccaagtcgtgactcacgagcacggaggtgtgtggccacgtaattctatagccgacgggagtcccttactaatatctcgagtcagcccggaattactatttcgtcgcgttgctgctcaagcattccaaggcgagcttatttagtgtgatgatgttacccgtcgtatctatcaaatatagctccgagataacttagggcaggttgatattaatgtttaaatagatagagatctcttattcagcgtcacaattttcttctgtgtcaaaaggatttctgttttcgtttatctagcgtcaaatagaacaaaacataagaacagaatgaggaacgtaataactgttattcaggtgttgataacgtgattgatgaaataatacatatataactgcaatatacggactgtcgcaggtcgagagatgacaccggaagtgatatcttaatgagccaaaggatagactcgcccagggtgagacctaggtccgccttagcacggcctccctagctatattggtaaattcaggcgcaagggctttccaaacggccagagctacggctctggacggtggagagactggttgatcgaaaagttggctgaccgctccaatttcccaattatggaggccggctcgttcaaaagacgtcaacgaagcagctcacccgtgctccaacgatgtgggtatgcatcgcacgcaggcttctattggcgagcatcagacccatatgcctgagagaaccggccggcttcatcttccgacgcaatggcttgtgtgttcacaagcgcttcttcggaccagctctgaattgccaagcaaggagagcggtataaatggtggaagttgagtgctggcgtgactcaccctcaagattagtggggcagttggcttttattgctattgggtcatttcctgggcgtgcacggaaacctaacaaaggtagtaatcgtgccagtagtggggcaggagaatattatgcatagctgtcagcatatttgttcgtgatttttaattggaaagtgaagcgaagattcccagtatgctgccaaattggatcgcactcacgcgcttggtgtgcttttaaaattcgggtgtctctaaagtgctttttcttatcgttgatgcgttcaataaatttaactcactttaggaaggctttctacaattatctcaccgcaaaaatgaaactccttaaatcgcagaatgaggccgcgtttgacatgttaaatatttaacttcacaaataatccgaacagcgtatgtataaaagtgacaaaacgaaataaaagaaagattaaagttggttattaaataacaattaaacgagcatggtcactggttccgcagcaccaagcacgaaaatggaaaatcgacctagtcctgatcttctgccgaagcattcgtcgatccatctcactgccgataaaaggagctccccttaggctgggtgacaattgtagtagtcaaactttcccatgtgtagcagcggatccagcattgttttcccggtggcctccgccagggcgggtgcccagggcttcaaaaaggcttcgcagatcattggtccgacaatcgctccaatttggggatcaatgccagacatatcaaagcccgttgtctcgatgacctgaaagcttatctcgccctctttgaatcgcatgtcgaagaaggtcttcacatccaacatttgaggtctgctggcatcatcagggattattagaatgtagtggctccgcttggctgtgcggacagtctccacaaaactgtggaagaaatcggcaccatccactgtatggatttcaaacccaaacctctcctgtaggacgcacagcccgaacgcatgaggaacaatccctgcgcatcccgaggcgatgaaatagagtggatgatcgtcggcgaatcttgcagcaaacgctattccaggctggacgcctttttccgcggccttaaacaaggcagctggaagtacctgcagagatgaaataagagccggaagcagtgcccagttctctctttcgttcagaataccaccaataagagacagcatcagcatatggatagcttggaaagcttgagttgttatccccgtggagaatgtttgatgaccgaaggacgcgagttttgagtttgcagatgccgtgaacacgactgacttgcaagccttgtccttcaagaacgcagcggcttcgacagtttccggcgtcatcccggactttgaagacaacaccacaagtgtcgtcggatcattcaccattgacgggttggcgcgcatgaggttcacgaaagttgcagaggcatatgcttcatatcggaggtttcgtccgacctggtcagtatatcgcttcaaactcctcgcgatcgccagacctgccccggcagagacgaacaggacgctgctgatactcgacgccgtggcgcgtccaaatttggcgactgtctcgagctgttggagcgtcgcgcgcaactgcccagacatctcaatcgcgctggtagatgaaggtgcatacagcaaatccattgtgctgtatcgagccggcgttctagcggaagttgaatggaagtgtggtttgtttcagaaaactggatgctgactggtccgtgtcagaggcgagctgacttatttatgccattcagcgggcggatcagacgtcgttgtcgttatttggggtaggtgcaccaaccttgctgagatattggttaccgtgtgggcccctctttgaatacatggaactgcgaggtgattggcatgtcaggttacgtcatcgcttacgcatcgccaaagtggcaaggaaataagagagaaaatagacttggtgtcatttagcaggacggatcagaagtcattgattgcggtttggtgcaccaactttgggcctacgacgttggtaccttaggctgcgtcagctatcacgcgctgcccgatattaaaaggcactcgccaaaatccggtcatctctatctcaacaaaccctctctacggtctttcattttacaatgcccctccctcgcgcgtaccttggtactgcccagccaccagccagtgtcaaggagttctacttcgtccgccatggtgcaaccgatctcaacgagaaagaaatgcacttgcaaggtgaaaaacattggggtgtgcagggcgccggcacgaacatcggtctcaatggaactggcaaacgccaagcggttctcgccggcaacgttctccgcaaacttcctatcggcagcgtcgtctgctcgccgcttttacgcgcaatacagacggctttgatcgccaatattggattcctctgctttgacatcgacgaggacctcaaagagcgggactttggcaagcatgagggtgggtatggaccactgaagatgttcgaggacaattaccccgattgtgaagacaccgaaatgttctctctccgcgtggcaaaggccctcactcatgccaagaacgaaaacacccttttcgtctcccatggaggcgtgctcagggttatcgctgcacttctcggcgtggaccttactaaggagcatacgaataacggacgtgttcttcatttccggcggggcttttcgcactggacggtagaaattcatcaaagcccggtgatcttggtcagcggttcaaaccgcggcgtcggcaaagccatcgccgaagacctgattgcgcacggctatcgcctcagcctcggcgcccggaaagtcaaagaccttgaagttgctttcggaccgcaagacgaatggctgcattatgcccgtttcgatgccgaggatcacggtaccatggcggcatgggtgaccgccgccgtcgagaaattcggaaggatcgacggtctcgttaacaatgctggctacggggaacctgtaaatcttgacaaacatgtggattatcagcggttccatctgcaatggtacattaactgcgtggctccgctgcgaatgacagagctctgcctacctcatctctatgagactggatctggccgaatcgtcaacatcaactctatgtcaggacagcgcgtgctgaatcctttggtcggttacaacatgacgaagcatgcactgggaggcctcaccaaaacaactcaacacgttggctgggaccgcggtgtgcgggcgatagacatctgccctggctttgttgccaccgatatgagtgcctggactgacctgattgcaagtaaggacatgatccagcccgaggacatagccaaactcgttcgcgaggcaattgagcgccccaaccgtgcgtacgtgccgagaagtgaagtgatgtgcattaaggaagcaacccgttgacatcgaatcgttcagagagcgtccgaagttttgtttttgcttatgtattgttgtcgtttctcaaaatatttcagcgcaatgtttttaatttcatatcgtgatgtttgtaatttgtttcattaattaatgtttgtgtagttcgaaaatagacaaacatatcaataatatattgattcttaatataaggtattaagaccacaacattgtataatttattgaattaataacgaagaacataacggggcttcaaagaattgtgacgtgcgcggatgtcggcgggctcaggcgacgaccgttcttctttcctcagatgttcctgccaagatcaaacggcgtgagcacctcatatccggtttcgctcacgaggaccgtgtcaccgaaacgcgcgccgccgatgccctggacatagacgccgggttcaatgctaaggacattacccacctctagtaccgtctgagagccggccttcagctcgattccgtcccaatcggagtaaccgatcccccgccccgtccgatgcaggaagggggcctcccaaccgctacgcttgattactgccactgcggccgcgtggatctcgcctgccgttactcctggacgcagcgctgccaaagcggctgactgagcttcccgcgcgacatcgataacctttcgcaagtttgcaggcaaaggcttcgaaccaatgggaaccggtcgatcgaaacaagctgcgtggccacggaacgtctggccgcaaaggcaaatctgcgcgatagcgccatcctgcatgatacggcccccgccggaaggatggcatcgggctgtgcgatcggccccgctgcccaccatattcaattggtgcggccagaaccgtggcagttcctcatcttcagctaacaactctccatttcgctcaatggcggcagtaacggaggcaagcgtgaccttccattcggggatgcccggagcgatagcattgcggcaggctagaaattgctcacgtacgatgtcacagctttgtctgatggcagcgatccccgccgcatccttgcaggcccagagctcttgcagcatcggtgttacgtccttgatgtgttctgcgccaagcgcctgcctgactaactcgacattggcgcccgaggtacaattgaagtccaaaccgatcaggcctgggtttggcgcgatccctctcgtatattgagcaagcgcatcttgatttgtcatgggagcagctatcggtccttcccattcaacccattccacagccacaggcgtcttgcagcgcgccgatatttcccgcgcttcactgcggggtgcgacgaaggccggtttgccgtactgttgcagaacaaaccagacaggcctgccgaccggcaaaccccataatccggcaaaatagttatggaaatccgggccggacaaggcaagaacatcgatgcctgcccgtttcatggcggtctgcgcaccttgcaggcgcgtttggtacacctcatcggagggcgaatcgttgacgcgcattgcgcagtttggtgtcggatcggggccccgaggcgattgggaatatattaaatttcgtaaggctttttgctaagttattgatttgctcgtccgaggttggggtagggtcctatttatgtccttcagcgggaagggcgatacttccgagaacatgatgtccacaacgagccacaatttccgctccaatgtcagcgttacattcggcgcttaccaaggaagcagccgcgttaataatgtgggcccccggctctttcacatgagcgagctgacacatagtttggacgccagttgttgctgcttgattatatataattttggccaagtgcagcgtttaataaatcgtgtgacaggatatatcttgtggtcagg

SEQ ID NO: 69 - DNA, 251006 bp, Agrobacterium rhizogenes
ggccgcaggatttcgttcgtcgtgcgtgatgagatcgataaatgtttatcgacgaggacaagatcgacgatgcggttcttgcgctgttgtagtgacgctccacaacgagtgttgcgccgtgaaaggctttgactgggccgcgacggaccgcctttgcaggaagggttcggtcggcgatcccgtcaataaatcgaagctattgatcctgacggataaaggtctgcgtcgatcggaggagctattccgacagctgtttacgcgctagccattggccgacggtctttgcgccctccattcccacggcgtagttaatgccggcggggacgggagtgtctactatgtgcaagcacgtcggcgaaccatgccttcggattaatgtcgttcagacgggcggtcgtaagttgaatgagtatgactgccgcatggtcagcgccgcgttgggagccggcagatgtccagtcgcggcgcctcaaggccatcacatgttcactctgtggccagaaggcgtcgctccttgggtggcaggatatattgtgatgtaaacagattagatatggacatgcgaagtcgttttaacgcatgctttatcgaatataaaatgtagatgggctaatgtggttttacgtcatgtgaataaaagttcagcattcgtttaataatatttcaatatcggtgtctagagacccgtggatttgtatagtcagcaccatgatatgaatctataaaatattgtatctccaattgcaattcaatcgatataagaaattaatacaagccgttcatatagtaaggttgccaatggcattcaataacgaccgtacagttgccgctatattaatctacgtgccatttcttaaataaagataggcgaatgactatcgaaaataaaacaattattaatgagtgaaaacgtattgcacaaataaagattcattatggttggctcaaattttggctctggtgctcgatgacgtcgagatgaggacagtagtgatcaacttggcggtcgataccttggttacgccactcccagagtgccatgtcgtcctccgagcggtctgagataacccagtcggcaattgctgctgcattgccgggcgttccccaaccacgacgaatatgctttcgttcatctaactcgcgtcgcactgccctcccagtcatgaagtcaaagccaaattctaccctctctccatttcccagctcagtcgagaaatcgtaacacctcgtggcagctgacagtttcagaaaggggcgtatccctcgaactccagggtcctctttcacatagttagcaaggcgtactgctgcataatctgcgttgaaggctctgatgactacaggatcctcggacaagcccaattgatcagggcgaaccctcgcgctcataatatgaattgcgacgacccttgcttcctgtcggagcatcgaatcaatccaagccttccctgcggcatagaggtcatcgactgcgatgtcatcaagatcgagtagctttgccaacctaggaagttcttgaggaaaaatcaccggcatgacagcaaccgtctctcgccagtcagttgccggactggcttccctaacgccatccacgaatgcctcaccgcttgcgtatttgaatgtgtaaaagagaaggaccactctttggcggtacttcggacgccggcttagccacgcggcaataatgtgggcctcaaactcacgaccatccaaaaatatagtcgcgcctggattgacctcgctggccttgtcgagaagaggttccaaaaagggaacggtgtctttcgtaatagtacttaaatctgtgagttcgccatgcgaaacctctcgaacgattatcggcgtatccctgacatcagctgaatgaaattctcggacgagtttgtcgggcaaagtggagacccgccacgtgttgaagtcgtgggaaacgatgggcacatcgtcgccggtgagtgcggcatcgagctcagagaggttccgcctgccaacctcaccgagagcagtcaacaacgaagtttcggtgcattcctgtatccctttacccagattatacatgccccggtgttcgataacttgaagaggcagtggctcctcaagatgttcaaggaggtggggtacagagtgccgggcgaggacctcatccaccgtgacaccaaccgggagatcccattcgagtttccactggggccagcatgtgcccgcgacggcgaaaggtttgcgctggcaaagaacccggctgctgcaggtggacctatccttacccatggcaatggggttttgctaaaaagtcaggcactttactgggcaattgatagggtgggattgcgttattaactgttctccagcgggaatctttatctttattgaaatgctaaagcacttagataaaatacagctgtaccgcaatataaaatagtaggataatgtaatatgtgtatcgagaatacgacaagctaatataatctagcgtcaaattgcaataatttaaatcaaaactactgatgaaataataaaagatggtcaatttttattggtaggagttgtcgaaagattcgacggacggccattacaatacataggtgcaagaagtaaaacaggaagggaaacggaaaacagtgctataaaaaagcgacagatcgcggcgatcactgactgcgatcgggaagaagctcgccaagttcaccgagaatagcagagagcgcatcctcatcgggtactacgaacacattcgtcccagagggctttgtttcagctgcgccaacccagaaagcaaggccattttccaagttgccgatggcggtcagcatgtctcgatcgttgctgccgtttccacaagcgatgtgaaggccgatcccgtgagagaggcccttgacgaaggtgaaatagcctttggattttccaactgtttcaacgggcactagatattgaccctctggcgcggcaaccaccttgaatttgcgagatgactggttgccgatgagcgaagaaagcatttctccggcttctttgtaagatttgtgagattcccacatttgacagccgtagaaatgccccatcggaatgttgcggattcccgggatgccaccaaatttgttctccatagccgcgtgaacggcttgccagttgggcagggagaaagaatcgaagcgatcatctttgtagatcgtgaccattccatcatttccctggaatccgatattttcaatggcgctgaaaactgaccttgcgatttcttcgcattcccgtgcggatgtgagcaattgataatggcccttgcaggcgatcctggtcaaattggcgatgatgttgatggcaggattaatatcccaacactggtgatttcgatcttgcttaaaggtggtaccatcgccgtcgaaggcgagcagggcccggagagatgaatcggcaagactgcgtcggacccgctccgcggcgtcgggaatgaggctgataagagacatatccaaaggtgtttgtgggtaacgggctgctcaatgaagccttaaatgcaacgcaacatatgtaaggatgagttgacttattggagagagaaataggaatgagctggccagccattatcaacgtggggccatgctgacaatgtttacgtgaaaggctcaactacctcgaagcagacctctatattcgttgactttattactgaacaagaagttgcttgccactcattttcttaaatcttgccctttctgcgcctcgctatcatgcccgccaacgacgcgacatgcgctgccgcgattgccttccccgagggcaactggaaggaagaacttgatgcgctccgcaccttgtgtgaccccgtcgaggtggttaaggtcgcagtcggcagaggtcttagcggcatatgtaatgttgttgcagcaatgaatcccacaaaggtgaggggcctcggcgatgtcatcgggcagatgccggctcttaatcaccgtattgctgccgccgccggcgaaactccggtgcgagaccttggaataggttaccagtgcgcaatctgccaccccgacatagccagtgcgatgttagccacttctgaggggatcagccacgttctccgtgaaaggattgagaaagaagttgaccgggacattggagaaggcgccaccgtctgcattttcgttcagccgagaatgagctccaagggctctccagtttctgtccatttcaccctccagtttgcgagatctggaactcttgtcgatgccagaatgatggagagttacaatttcatgaaaggcaatggcacagtgaccgcaccggatttgaaaagtcattggaagaagcacggtattgacaggccaggcccacgtccgcccacgtccaagtttgaactcctcttcgccgctgtccccgacaacagtaaacttgccgccaccgattttacccatctcggccctgtcgagcgtgataaggaactactcggcagcacggtattcgggattgccgctaagaaacctggtacgatcgtttatccgtgcgaaaaggttctctgtttggaggtcgacgtccaggcgcatcgcgccctggaagtacttcaccgccttggggaacaggcttatagcaatggccgtggcactagcttcggtcttcacaccggtccgtcctcttgccttaatctttccgccgccgcgctcgctacatttttcaaacgctcggatctctgttcccttccattgagtgatgcttttgtccttttctgcgaccacgccactggcgcctacagcgccaagaaagatggccttccgatcactgccttctcccccacgagcaccaatcagttcgaactcgtagagcctcaggtcgtcaaggcatatgttctcggacttttcgacgcgccgacgatggttacgccccgcgacaaaacgcgagccagcttctgcagccaatatgtacgtttccgtgaaccgcatccctgtgaagagttcaatgaaattggagttttgatcctcgatgctgctgctaaaatgctcgaacgttatgcaaaatttctagaagatggtggaagagatgatgatgaaatggcgaacataatagatgtatttgggttttgtcttaactagtggattgattgaaacaaaggagtccgagttgggattccctttcggtcttcgtcgtgcaacgatatcgtatgcgtacaggtatcacatttaacgttgctgcggcggaccgagcccgcttggaagcgattgttgcagctccaacttctgctcagaagcacgtgtggcgagcgaagatcatcttgatgagcagtgatggctcgggaacggtcgcgatcatggaggcaaccggtaaatccaaaacctgtgtctggcgctggcaggagcgcttcatgactgagggcgtcgatggccttttgcacgacaagagcagaccgcccggcattgcgccgcttgatggcgaactcgttgagcgtgtcgtcgcactgacgcttgagacgcctcaacaggaagcaacgcactggactgttcgtgcgatggccaaggccgttgggattgcagcctcttcggttgtgaagatctggcacgagcatggtcttgcgccgcatcgctggcgctctttcaaactgtcgaacgacaaggcctttgccgagaagcttcacgacgtcgttggcctctacgtctcgccaccggcccatgccattgtcctgtccgtcgatgagaagagccagatccaggcactcgatcggacgcaaccgggactccccttgaagaaagggcgcgccggcacaatgacccacgattacaagcgccacggcaccaccaccctatttgccgccctcaacatcctcgacggctcggtgatcggccgaaacatgcagcgtcaccggcatcaggagttcatccgttttctcaacgccatcgaggcggaactgccaaaggacaaggccgtccacgtcattctcgacaattacgcgacccataagcagccgaaggtccgcgcctggctggcaaggcatccgcgctggaccttccacttcgtcccaacatcatgttcatggctgaacgccgtcgagggattcttcgctaaattgacacgtcgacgtctgaagcacggtgtctttcattccgtcgttgacctccaggccaccatcaaccgcttcgtcagagagcataatcaggaaccaaagccgttcatctggagagcagatccagacgagatcattgcagccgtcaaacgtgggcaccaagcgttggaatcaatccactagcgtatgaacagtaataagaaaatcccgattgtgaatagtcccaatttcaaatgtgtccgtgtgtaatttgcgtgtcttcagttgaatttcctttaataatatcaaatattcaattgtgaaaagttgtattggttcaggttcaagctttccgaatttgttgaattttattccctgttttcaatttgttgacttgtttgggagacaccttttttgtgtttcgtgaacatgtcaccccttcggtatacattagcctacaaagtaaataacgttgataaatgtcactcatgttgtaataaaattgagcttattatgtataaccagaccctgtgttaatctaattacaaagaaattcatcattctcccaagcaatcctgagtagctgcgtgatggatcttccatatcagcgcccacgtttcaccccgtttgccgtcacccatccacgtagtggagtcaacctgaaccgtgcaatttctcaggcctttgtctgctatgatcagttctgcgaacggctcttgcgatatcagcaaagctggacggattgggtgttcgaccacggatttgcagaagccattgaagacgtggcgctggtgttccaggttgcaccttgccttcatggcccccgaataggcgcgctcgaagtgttgatacctcgtcgcacccaggtcttcatttatatgtcgaacaaccaattgcagcgctttgttgcacaccagtgcattgctcaacttggcgacgccgtgcttgcttgcatgatcccgccctacgcgagtgacctctcgctgcaggaaatggctcgggcgcacaacagattttgcccaggcagttacacgaggtccgcagacgtacagtgctttatcgccatccaactcagcagccgattcgttgaggagggcacatgtaacgtgcacgggcgaaatggcttaaaaagaacctgccgcttctttcgtcgccctgctgagttcttcagccgttatgacatcgttgccattgggccggtgctcttccatgatgaactggattgcccagcaaactgcaatgagcctctttcctgctttgacctgcggtacgactatcaggttttcctccaggagtgcgatgcccatgatggtgtggggcattatccggaaggcgcaccactacctagtgttgccatcgtaggaggcgggctgtctggccttgttgctgccacagaactacttggcgctggcgtcaaggaaatcactcttttcgataccgttgatgagatccgtagttttggggcatcgccgatgccaaacggcgacgctcaccaggccttgacgtcgttcggtgtcatgcctttctccgccaaccaactttgcctgtcatactatctggataagtttagaattccgtccagccttcgttttccttgtgccggcaacgaccacacagcactatatttccgccagaaacgctacgcatggcacgcggggcaagctccgccggggatatttcagcgggtacatgtcggatggaagacactactctaccaagggtgtgaacggaatggcaggagactgatggctccgatggatatctctttcatgttgaaagagcgtcgtcgtgatgaagcctcagaagcacggcagctttggctccgagagttcggaaaattcactttccatgccgttttggtcgagatcttcagctgtggtaattcgagtcctggtggcaaggcatggcaaacaccccatgatttcgaggctttcgggatactgaggttgggatacggccgagtttcgtcctattacaacgtgttgttttcaacgatcctggactggattatcaatggctacgaggaggaccagcatctttctattggtggggttcaacttttgcaggctctgatgcgcattgaaatattccagaaaagccatgcgaaagcacgactctgttttgatcccgtgcgtggaatagccaaggagggcgggagattgaaggtatgcttgaaacacggtcattcgcgtgtttttgaccaggtcatcattggcggcagtgctgaggccgctacagttgataacagactggccggggatgagacttccttcagctacaatatcgaacccgccgtcggaaactcgtctgccgctgtcaattcagcactcttcatggtcacgaagcaaaagttttgggttaactccggcatcccagcagtgatatggaccgatgggcttgtccgtgagctgtgttgcattgacatcgaatcgccagctggagagggccttgtcgtttttcactatgctttggatgactatctatcccggccgatcgagcatcatgacaagaagggacggtgcttggaattggtcagggagcttgctgctgcctttcctgaactggcttgtcacctggtcccagtcaacgaagactacgaacgatatgtcttcgacgaccacctaacggatggttttaagggagctttgtggagggaaaattctctggaaaaaggtcagtatatccaggatctgcctgggaataattttcctattggggatcacgggggagcctatctgattgaccgtgacgactgcgtcaccggagcctcgttcgaggagcaggtgaaggcgggcatcaaagcggcctgcgccgtcatccgcagcaccggcgggacgctctcttcactccaaccggtggactggaataaaaaatagaaatttcctgattaagttatagtcaatgtactattgcgtgttaatcccgtaggtatgcaagctgcaccggcagcatcataatttgatgttccatcaataaattaaggtgcccgttcattgtgtattacattatgtatgtttatcaaaaatataatcgaagtccattttaagtctgatattaattggaattccaaacgattccttgatgcctatcttcgctatgattgtatggtaataaagtctccacatctcccgaaaaatgctttcgtgatttacttgtctctcacgtgctttcgcatcttgacagccaaaagtgggcaacttgagaagagtattaactggccacgcaactcgagatattcccactaaccccaatgacgtcattgcactcgtcacgggtagcagccccacttgcctttgccactttattaattctttggcccactggccattaattggcacctacatatattagtggagaagataaagtgtcactatcgtttcctgttcaattttgaattttgcaaggatttcatgttgtcaactacacagcttgaaaggaaatccgcaatcaacggagaaacgtcaacatctcgacaaaaaaagaatgcttcatcattgcgtagactgcatattgaccgctcctttcggcgctgggcctgcttttactgttgcctagcgttcggacagccaccagagaatgggctatatagatcctttcatcaaaccaaaacattactaagatcatgctgtaacgcttcaatacggtgagtgtggttgtaggttcaattattactatttttgaagctgtgtatttccctttttctaatatgcacctatttcatgtttcagaatggaattagccggactaaacgtcgccggcatggcccagaccttcggagtattatcgctcgtctgttctaagcttgttaggcgtgcaaaggccaagaggaaggccaaacgggtatccccgggcgaacgcgaccatcttgctgagccagccaatctgagcaccactcctttggccatgacttcccaagcccgaccgggacgttcaacgacccgcgagttgctgcgaagggaccctttgtcgccggacgtgaaaattcagacctacgggattaatacgcatttcgaaacaaacctacgggattaatacgcacgtggctggcggtcttcgattcatttccacgccggagatgatatcgaatatgttctgttaagttaaaataagctgcgagccatggcgcgattgtcctgttttattaatatagtactttaacgtctctttagagcgtttgtgtaatgtcgtgaaaatgttttatgtcaaatgtactgttgaactataatattataagtccaggtgtgtcgttgttgttgatactgcaatatatgtgtagtagattagatagtcatatgagcatgtgctgtttttggcaaaattcagcagcaggatcaacacagaagaaaatatttagtacaagaaaataggtcaacacattacaacgtacgctacaactcccaaggttctgtgtcacagactgcgggagggtacatagaacttatgacaaactcatagataaaggttgcctgcagggggagttcaagtcggctttaggcttctttcttcaggtttactgcagcaggcttcatgacgccctcctcgccttcctgatcaggccccgagagtcgcagggttaggtctggctccggtgaggaggcggccggacgtgatatcccgagggcatttttggtgaattgtgtggtgccgcaagctacaacatcataggggcggttttcagtccctcgccgcagaaagaaggtgcaagctacctctctcccgtaaacgttggtcacttttaactccagcaagtgaatgaacaaggaacttgcgaaaatggcgatgaagcattctaaatcaggttcctccgtgcggctgtgcggccaagcaaggttgtgaacacggagcatctcctggagggcgagctcgctccgatatggttgaatcgttgtcgccagcacggcctccattccaaatgtaatggattgttccttcagcactttctgcatcttctcgcgagaaagatagacaaatacatgttggtcgttttctcgagccagatccggctgactaacaaacataggaggatgatagcagactttgttcttcaagagctcagctagttgtttaagtatatatatcggtggagagttttccttcaaatctagcactgcaagagcccatcgtttctggaaatgcaggaggggtttgctatagtcacggctatagattgcaaaagcaaatcggatcccctcgaataggtttatctggctccatgctggagtgagatctactggttgaaatcgtggaaggaatagcaatttgggatccattgtgatgtgagttggatagttacgaaaaaggcaagtgccagggccatttaaaatacggcgtcggaaactggcgccaatcagacacagtctctggtcgggaaagccagaggtagtttggcaacaatcacatcaagatcgatgcgcaagacacgggaggccttaaaatctggatcaagcgaaaatactgcatgcgtgatcgttcatgggttcatagtactgggtttgctttttcttgtcgtgttgtttggccttagcgaaaggatgtcaaaaaaggatgcccataattgggaggagtggggtaaagcttaaagttggcccgctattggatttcgcgaaagcggcattggcaaacgtgaagattgctgcattcaagatactttttctattttctggttaagatgtaaagtattgccacaatcatattaattactaacattgtatatgtaatatagtgcggaaattatctatgccaaaatgatgtattaataatagcaataataatatgtgttaatctttttcaatcgggaatacgtttaagcgattatcgtgttgaataaattattccaaaaggaaatacatggttttggagaacctgctatagatatatgccaaatttacactagtttagtgggtgcaaaactattatctctgtttctgagtttaataaaaaataaataagcagggcgaatagcagttagcctaagaaggaatggtggccatgtacgtgcttttaagagaccctataataaattgccagctgtgttgctttggtgccgacaggcctaacgtggggtttagcttgacaaagtagcgcctttccgcagcataaataaaggtaggcgggtgcgtcccattattaaaggaaaaagcaaaagctgagattccatagaccacaaaccaccattattggaggacagaacctattccctcacgtgggtcgctagctttaaacctaataagtaaaaacaattaaaagcaggcaggtgtcccttctatattcgcacaacgaggcgacgtggagcatcgacagccgcatccattaattaataaatttgtggacctatacctaactcaaatatttttattatttgctccaatacgctaagagctctggattataaatagtttggatgcttcgagttatgggtacaagcaacctgtttcctactttgttaacatggctgaagacgacctgtgttctctctttttcaagctcaaagtggaggatgtgacaagcagcgatgagctagctagacacatgaagaacgcctcaaatgagcgtaaacccttgatcgagccgggtgagaatcaatcgatggatattgacgaagaaggagggtcggtgggccacgggctgctgtacctctacgtcgactgcccgacgatgatgctctgcttctatggagggtccttgccttacaattggatgcaaggcgcactcctcaccaaccttcccccgtaccagcatgatgtgactctcgatgaggtcaatagagggctcaggcaagcatcaggttttttcggttacgcggatcctatgcggagcgcctacttcgctgcattttctttccctgggcgtgtcatcaagctgaatgagcagatggagctaacttcgacaaagggaaagtgtctgacattcgacctctatgccagcacccagcttaggttcgaacctggtgagttggtgaggcatggcgagtgcaagtttgcaatcggctaatggttagtcgatgggctgacgagtttgatgtcaggagaagctgagtgtgtcacttgtttccctttaagaagtattaatgtaataaaaatcaagatctggtttaataactggatacttgatttcatcgcgctttttttgaatatggagtgcaccccatttcaccggacaagtcggctagattgatttagccctgatgaactgccgaggggaagccatcttgagcgcggaatggggatggatttcgttgtagtcctcgatccatccgtcgcctgcggcgaacatcacccgtcagcaattcaacgtgtcgatagtcgttagacataagcctgtcctcaagcctgtgcttgagcctttctgcttatgccgactgtccggtcgaaatggggggcagttcagaataaatgtttgttgtcttgactttaagatatcctttgaaatttgcgttattcgtatttcgcttttggttatttccaaaagactttgctcagtaagatcaaacgtttgtatttctccgagccacaatatttgacctatatgcactggcccacgcgccgcaatagatgaaaattgccaaaattagctatcggtcttctgaaaagaagggccgacatgttttcatagaccatgcaaagtcatactacctgaaactgataaataacgacaaagaaagtagcctatttaaaagtcgctatagcatgaattcaacacaaggaaaccaaaagtcggaaggaagactttaatcccggattatttggacatgataggagctatggggcaacgtgtcattttcatgagtgttgaatgattttctgtagcaaatagaaaacgttttttaaaacgatgtggccttggagtaatcagcggaagaaatggtcatgctcagataatttccgttgctgacctcgcaaccaacccctttaaatacctctgctgcccatgcattttgccaagttaacctaaagtggcagctgaatggctcgttattgcagtggtggctctcaacggcttcatgtcgatgattttcgttggatcaaggagcccactcgactgaaggctcagcttattaatgtggtggagacctacaaggctgcacaaacagagacgttaaagtactatatatcatctgcaactgagcgtgtggctcatgtggaggcagccgaggtcaacaatgcggaaatggagctgcatcctgctgggttgaagtaccctctgtccttcgtctttacctccctggccgtggctacagcctgcaaggagaacaagcatctcttgtgcgaggagcatttggagggggacttgatatcgtgcgtcgttcctccctatcagacaaatgtctcactcgctgctttaagggagctccacaattccatttcgggaggagggtaccaggaacaagcagacatggattattttgtggcgatcatcccaaatgataatttcgactatcagagctgcgaaatcgacacacgaagttgcggtaaaggactttgcaagatttatagtagggaactgggagggcagcctctagcttatgacgccatactggcaatcggcaaggtgctgctgctggaatagatagtgggccgctgatccgagtttgattttgtcgtattatgttacgtgaactttttatcatgcatgtttcgcttatgctcccgagtgtcggccatgttgttgtgttaaaataaaaggctgatgttaagtcctattgtaaaatacctttatagattaaatatatatagtataacttctgtatgccgtcgatgagcggttatatgattgtaatctatacgttgttgcaatcaatcgtattacagtgagccgtgcttaatgaaataaacatcatgttaaatgtctatttattcaatcaacatgcgatgacaataatcaaaaggggaaacgtaataacattgcggtggatacagcgtttattgggagatccgcgggccgatacacttaaataacatagacagaatttgagagagcacgcaggttgtagccaagttgagcgacttgccggtagcacggaagctaagctcaggtgttacaaatagacaggcgtcgaggcgacgagcacgacgaccttgccggacattgcggtcgcagggggctcaaagcggttggcttgtaacggaccttgtgtttcttgttgtagctttcatcgagcataaccattgggacggttgctgaacaacggtaacgcacttttttcacgggagcgaggtagaagaacatatttccccgtcggcagccggcggtgagcatgccaattcctaagggattcaatggactcgtgcgaacggtgagcatgccgttctgaccgtcggtgcccaatcagcaggccactcccaacatgttttccaagtccttaaaaccagtctttatagcattgatctcccagcaatctttattgaagtcgattttaatattcaaaagaagattttagtggaaagggaatataatcgcgtggccgaagaagagccttcaaaaatcagaatccactaggataaacaataatatctgaaaagcattgaatttgggttaggcacgagaggctgacgcggatgccactcgattgctagtggaaggattcccttttttctagcgtatcgaattcaccgtttcactatatgttttcctgattggttgatctgcgggaccaccattgactgccactaatatcgaaagtgggtctgcttcgattatgatgctttgtgagaggttctcttcccaatgcatgcaagctggcagattcggatactctcaatagagatcttatttcgcgtctcaaaaagttcccagaaatcaacaaaggggagggcaggtcctttaaatacgttgcagctgtcctttaaaatagaagagaatttacagctggaggcacagaccactaaactgcgaaagtaagcatggcagatgagttggagcgtcaattggaagccatttctctcattacagtcctgggtccggatgtgaaggctgagcttgaggcggagctacgagactactgcgaagatctcgacttctggaaaagccacggtttaccggtggcggatctcgatcagactgtgactgtcgacaagcttctatacatgtatatggatcgggcaacagcagacctgtgtgtgaagaatcgctgcctcgtttgcaacagtggcaattcagccgcaaaagtaacctcgcttccaccataccttgcaggcgtgacaagcgccgaggcctatgagaaactcaactccattgttgatgggagtgtcgccccccaatctcgtgggcctccctgctattttgtggcgttcctgcccagcagctgtttcgagaaaaccagtgagatatcggtgcgcacagtggacggcgagtgtggccccttcgatgtctttacccggcagcgtcagccacaggatcagagtgatatgttttttaaatatgaaggagttgtatgtgctggaaagagtgtatttatgtaagaattatcttttatagcctgtgttacgtttgaacccggtccgcgcggtattgttttcaataaatggtatgtgcggaggatataattggtctttcattggtgtgatttacgtgtaacgcggataataataaagtaaattacaaaagagaaacgcataattttattccagaatgattgcgagaaacgatgaaaatacatgaaaatgcatattgtcgccagggaaggatggcgccgaaataaacgaaactgagccaatacagtgacttgccaagcgagtttgatcctaccaaattcgcgcaaattaatgcccgtgttccatcgggccagcgagtttattcaaaagagtttcgtacacgtgggcggcgacggcaacgtcaatgcttgctagccctaccggcgagaagttggccggccccttccatgccttgaggtcattcatcaaggcctcgtcatcgagaatttcggtgtagttcttgatcccatcgcgcttgccgtgttgggtcagtttcataccgcgcctagaatagtagagggcaacggcatcaacgttgcgggcttccatcgcaacaaggtcatcggcgacaattagaccatccgcagataggacatgctcaatgtaatccggcggcatgtcatcaataccgagtgacaaagtgactgcgttgggggcgatttcagcggcttcgaataccggttttccgtagttggtcgccatgatgacgaattgagaatatggcaaaaggctacgatcgccgacagcttcaaggctaaaggttacgcaatcacgtaacttttcgacgagctcgaaattggatttcttaccgcggctgagcactgctaccttacgaattctcttagcggcaccatagttaagtgagagaattacagcttcggcaacttttccagccccaaacaagaaaacgtcgatgtcctctctgccttgcaacagcaggtttacgcatgctagcgagaaccaacccgttcttccattagaaattgccacgccctctaccgacataaggagcgtcccggacaccttgtcgcgcaggaaaatatcggagtgctggagcggctttccggtagcggcgttggttggcgcgaagtggatgtctttggtgccggaatatcttccgaaatagccaatgagtgctccttcagtccatccaggaacattcttgttgaacgttaggtaagctttgacatgtccggcttttcctgcggcaaacacctcccaataggacttgagagcttcgtcaacaaatgctggtgtgatctggatatcgaggtttgatagtgcagattcagtccagtgtacctcgcaaagttgtttggccatctgccttgtaggtgcgaattttctctgctcaaattgttgaggttagcggatttgtaaacgcgtttatatgggctgcttggagggtacttttggattaatttttttctgccagcgcattctgacgcggcaccgctttggaaagtgcgctgtgggtccgcgttttctacaataatgtgccgatccggtcagaaagtatatggatgagttgtgccagcctcaccaacgtgctgcaggcccatcatgactacttcaatgttaatgggggtaatgaataaataggcgaaattgggttcacggtgggcccagggaatataatattgccgcagaggtagtcggatgccaaggcccgcaactaatagttcacgaacaaattcattgtagtgggcggccaactccaaaaccaattgccagttattgtattgcaatacatatatgagtattcggatacaactaatttcattaaataatattttaagtgtggacagaatagcgcctaataaatttgcgaatgttgtccaattgacgtttttataggtaactcgataaatcgtgcttttgtgatattctgatgcggacaatatacatttaaacataaagatataagttattgaggcatttatgtatattacaatagtggggtacatttttcacagatgctgtcacccatgaaatattggcaaaatactcttaaaatatgcaagaaactaaagaggatgcatgggttgggctgtaggtacatggatgcaaatgctgttttgcaataagtcatatagtctcgtctgttgagtgaggcccattcaatcagcaagtaggactgaggctgcatgatcgacatatttttgaaccacagttttggcaagtttttcatacaaatgcacggctacggccaaatcgtagcttgcaagtccaactgctgaaaagttagccggcccgttccaagaaattagcctttgcataaggactggatcgcggagaacttcagagtagttcctgatcccattgtccctgccgtgttttgttagctttaaatggcgtcttgaatagtgcagcgccaacgagtcgatattacgtgtttccatcgcatccatatcatctgccaccacgatgccactcagcttcaacacgtgatcaaaatagtcagctggcaattcgtcaattccaagcgtcaatgtaacggcattgtctgtgatctccttcatctcaaagacgggcttgtttgaattcgtcgccgtaattatgaacttggatttgctgagatatgctcgattgttaacagccttgagtgaaatcttgacttccggctgaagcctttgcaccaactcatggtttgactggttgcagcggctgagaatcgcgattcgttgaattcttccagatgctcccgaattgagggcgaggatgatggcctcggcaactttacctgctccgaataggaagacattgatctggcttcggccctgcaataggagattcaggcatgctagtgccagccaaccagttctcctctccgatatagccaccccatcaacagagaagagacgtctacctgtgaaacgattgcgaagcacaacgtcgatgtgagaagtcggttctttgtatctcgcgtttgacggattagaatggatgcttttcacacccgaatagtcgccgacgaaacccaccagagctccctccgtacagccctctcgatcaagtggaacgaagaccttgttgtggccgagccgcccttcagcaaagaggtgccaataatctttcaaggcatccgcgacgagttccggtgtaatgtatattccaaaagccgatagagattcctctgtccaacattgctcgtgtatttgatcggccatgtttgtgtttgatcagcctcctttcgaaaatttcttgagtttcgaataattctaaaatcgaaggacgattaatagtgccataccaagacaagaagggtaggtgggccatcaatccacaagcctagcacattttgctgtctgctcatgcaaggtatccaatggaagcctggattggttagccgaacttggtgggttcaattggagcgggcaggtcactttttgtctctcaaataactgaaactaagttttgttatttggtatgtgtttgtctgttctgccgaaggtgcccgaatttgcgcaaattcctttctaaaaaggcttacatctagcaaaaggtgagccctgtgcatcccagcatttggacaaagcgcgccaattcggacagcgactggctgcgttggaggctcggatctcaaagaatagaaaagagttatgatcatgttcagaaccgccaattttgtgcggtatgagctctttgatgaaagtaatggtttcaaaaaagcaacatcgtgggtgaaaggtacctacatatcttcacagacaataactactgttgctgtttgctgattgactgacaggatatatgttcctgtcatgtttgttcaattgttcaattgttcaattgttcaattgttcaattgttaatgtataagttcgtgatgaaggatggttgttttaaaaatagtatgtttgactgaggttaagtcactcacgttttgcacatcgacggaccgtaagcattctttcggtaagaccgaagctcgtcccagataataggccccgtggagggaggccttgtatgggccggccgatgggcgtgctgagccgagtacggcgacgcctgcggcgattgcgcgggcggcactgcgcgcaggggcacgggttcatacgaggacgagcgtaaggggcatagagctttccgcccgtcgggtttcagccatattgcttgattgcggccgactggaatgcagccaggtcgtgctcgccggcggcgcctggtcgagcggcatgctgcgcacctcagtgttcggcttcctcagctcacggttactgtgtcggcgctaagaaccgaggcctttgatggcggacctggccttttcaatcaagggatgctgattttccatccgtaagcgtctcgacggtggttacaccgtcggcttcggcgcgacgatgagaaccgaaatcgtcagcgatagctttcgttttctgtcggattatttcctcctgatgcgagaggaatggctttctatccggctgccggcgggtgcgcgcgtccggattgaccctcccgttcgttgctacttggctcgagtgacgaaatagcacgcctggtgccgctgtatcatgtccatcgggctcacaggagattgcgctcgtagcgcgttggtgtcactcaccaacacgcgtcgtcgcaccaaattggggaggatggtagcggaatcctaaaatcctaaaaccataccgacgcgtcacggcgctcgtgacccctgcgagcgacgcggcactctctcacctgatccgtgctgcggttgctcaatacgcaatgagcattgtcacggttctcagggtaaacggcaatctcttcgtcatgcgggcgtggatgctatcaccgttagaaagggcctgcccccatggtgggtctctaaggttcagtctgagaaggggcagccagagcggcactgtttgaagagcagtctgaaccgctcagatcgctcgcatcgatgcttgggcggcgtcctgcagtgcgcgttcgagccgtagcaccgcgggacgctgagcacgtcctgcaggctgctcaagatagtagttccccggaccaggagtttttgcgaccagcggacagacctctagtccgagggacgccccaagaggaccacagacaggaagatgtccgatagcaagtcccagcccctggctaaccatcatcagggcgagcggcgtggtatcgactacttcgagtctaagattgcgcccctgcatggctccgaaattgtggttgaggagcgcggtccatcccatggcatgtgagacgacgtcaaacagcttgaaggaaagaatgtcctcgaggctgtggatcgatgcgagctcctcgcgccgacacataacgacatgcgacagtctcatcagccacatgggatgacgaaccaagtgcggttcctctccaaagcggattatcaagtccggttcggcattacgttgcgaaccatccatgagaaggccgacctggatcgacgggttctcggcctcgaaggcggcgagaaccttcggaagccaactcatcgacatcaattggcttgcaagaagcgtgactttttcgacgcgttggcgtccgaacatcgcctgcgccttgctttcgatcgatcccagcgacacctgcaccgtcggaaggaagtcagctccgtccagcgtgagagtgatgcggtttgctgttcgctcaaagaggggacgaccaaggtgggtttcgagcgcgagaacctgctggctcaccgccgcggaggacatgtttagttccttgcccgcgcgggcgaagctctggttccgggcagccgcctcaaaaacgcgcaaccaatttagcgaagggataaggcttggggtcatcgtcggagcataagtaaaacttgcggtaagcgcaattagataccgagtctacagatgctgaaccgggtggcataactctttcgggaactgcccatcaaaaacaagggaacaactacatgttaaaccgcagaatgctactctcgctcgctgccttgccgctcctcgcaggtccggccctttctgacagtctccccgatcatatcaccgtggcaactgagggcgcatacgcgccgtggaactataccaatgcggacggcacgctcgccggctatgagatcgacctgaccaagcttctctgtgagcgcatgaaggtgaagtgcgacattgtcgctcaggaatggagcggcatcattcctggactgacagtcggaaagtacgatgcgatcattgcatccatgggcgtcaccgaggagcgcaagaaggtcgtcgcgttctcgaagccctatgccaaagctcctaacggcttcctcacatccagcgacaatgccatgaaggacctgccggatgcgggcaagtcatacgatctggcgaagtcaccgaaggatgccgaagcggccttagaaaccctgaaatcgaaggtatccggcaagatcgtcggcgtgcagacggggtcgacggcagcgacgttcgcttcacagtacctcaagggagcggacatccgtgaatatccttcattcgagcagctaagtcttgagctcaatgcgggccgcatcgatctggccgttgccaacgtaaccgcgttcaaggccgccattgatcagagcaagggaacgctggtctttgcaggaccaaccttctcgggcggcgtcttgggacttggtacaaccaacgtggcacttcgtcctaaggacgaggcactgaaaaaggcgttcgacgacgccattacgtccatagacaaggacggttcgaacaaggctcttaccgaaaagtggtttggcgtcgacatctcgacgcaagagtaagacggctgtccctcctcgcgaatgaggcgggatttctcccgcgcgctgaagcgccgtgggcattccaatcttctgtacaggtgacggcatgttcacgcccatcgggtcctccgaggcaacgatcactattttcttcgagaacgagcccattcgggcccgtcaaggcgagacggtggctgcatgtctgcttcgagccggtgttcgatacttcaggacgacacccgtctctggatcgaagcgacttccgtactgcatgatcggccactgtttcgactgtctggtcgagatcgatggaatcggaagtcgccaggcatgcctttcccaggtccaagatgggatgaagctgcgagtccagtcgggcgcggcggccatcgacgggaactccgaccaatgaacgcgatgatcgacaatcagccttccaagtatgcggtctcgcctcctatcgacgccgacgtcgtggtgatcggtgcaggccccgccggcatgtccgcggccattgaacttgctacggctggctgtcgggtcattgttgtcgacatgcagccgtctccaggcggccagatattccgtgcggtagaggcgaaccatgccgcccgcccgaacacggagagtctgcttgccgcgctcggtccggcttacgcggccggcttcgaactcgttgagagatttcggtccactcccggcatcgactatcgaccggagaccacggtctgggaactgcgcgccgacggtaccgtgggctggctgcgggacatgtccgcgggctatctccgggcgtcgtgcgtggtcctcgcaaacggcgcgatggagcggccggttccgtttccaggttggacattgcccggtgtcctgactgcgggtgccgtgcaaacgctcctcaaggcggggcgcctgaaacctgaaggtaggattgttctggcgggagccggacctttgatcatgctgctggccgatcaactccgccgtctgggtgtacgacccgtactcatcgcgcgcaccgacacgttcggagacaagttcaacgccctttccaaactcaggatcgccgcgcttccagctctcggcaaagggctggggtggattgccagcctcaagatggccgggatacctatgctcactggcatttcaaaccttcgcgcgcatggcgtcgacgtcgtcgagtcagtcagcattgacgtgggcggcaagaacatgacggtgccttgcgacatgctcgtggtccacgatggcgtcattccgtccactgacctcgcacacggtgcgggcctggcgatggaatggcttcatggagactcgagctggaggcctaaaacgtcgtccgaaggactggccgaggcggcgcccggtccggcgctcacttccgggccgtgccggattttcgtctcgggcgatgcccgtggcatcggtggcgcagacgctgccatggcgcacggccgccacgtcgccgcatccatcatccgcgatctcggaaagtccatctcgaccaagcacggatccgcggcaaaagcacttagtatcgcgatggccggccgacccttcatcgatgccgcgtttcctcccggtctcgccgggcgcctcccggaggacgataccatcgtctgtcgatgcgaagagctcgatgccgggacgctgcggaaggcgatccgcgaaggcgcacgcgacatgaaccttgtgcgcggcattcttcgatgcggaatggggccctgccaaggccgtcactgttcgataacgctcgcgcgactactggcagaggaaggcgtcacggatcggccgcatcttccatttcgggccagaccgccgcttcggccgattccgctgggcgcacttgcgaacctctcggggctcgatccggaactcgcgcatattgtctccctcgatgacaagcctaaagcgagcatggaggacgacgcccatgaatgagaaggtgcgcgacttcgtcattatcggagggggattgcagggatgttcaatcgccttctttctcgctcgcgccgggaggcgggtcacgatcgtggagaagagcattccaggcagacatgcctccggcgttaacgccggcgggctgcggctcctgcttagagatgctcgtgaatacccgctttcgctccgtgcgatggaaatgtgggagaacctcgaccagttcgtcggaggcccggctgccgcggctgccgaggtctgtctcggaacgtcccagatcgcccttgcggtcgatcgcgaagaaatgcagtgggcggaatcccgatcgaaggacatgatccgtcgaggcatcgtcacagaggagcttgtcgacgcagcggagctgcatcgccttcttccaggtctgacgaactcggcgctcgggggactgatttccaggcgcgatggccatgcaaatccagctagcgcggctagcgcgttccggcttgcagcagaaggagcaggcgtggagatctgggaaggctgcaacatgcgcggcatgtctccgacgtcgtcaggatggcgcacggagacggatcgcggcgcgatcgaatccgacgtcgtcgtaaactgcgcaggcgcctggggttccaagatcgcggcgtccgtcgacgaggaactgcctgtcaacgtcatggcgctttcaatgatggtgacgacgcgcgtcgcacctttcgtgaagcccgtggtcatcgggatcgaccggccgctctcgttcaagcagagcgccgtcggatctcttgtcatcgggggcgggatttcgggcaagccatgtctggacgacgacacctcgttcatcgtgatggatcgcatggcgtccagtgcggccgcgacggtcgcggccttcccagcgctcgcgaacatttcggtcgtccgaagctggacaggtctcgaaggcctgacgccggatggcgttccctacattagtcccagcgcccgtcatcccggactgtggcatgtcttcggcttctgcggacatggcttccaactttcgccggccgttggggaaacagtggcgcggtctttgacaaccggatccctcgatccaagactggctccattcgccgcggatcgtttcgccaaagatacaacgcgggcgaaggaggctctgcgatgaacccagacatgatcgacctaataggttttgggccgcagggctgggggctacctttgttgaaagcggcaggggtcactctcgcggccgccgcatgcggttttcttctgggtagtcttcttggcgtgatgggatcgatcctgaagctgtccaagcatgtggcgctcagaggcatcggaagcttctatacaacggtgttccgtggcgttcctgaaatccttgtggtgtacctgttctacttcggaggcagccttgccctcacgaagcttatgaatgtcggagggatgaccggcttcttctcgctgcccggtttcgccaccggtgtcatggcggtgggtataatctccggagcatatcagaccgaagcgtttcgcgccgcctacctgcgactcgacaggggacagatcgaagctgggctctccacgggaatgtcgaactttctgcttcttcgaaggatcatcgcaccgcagaccctgcgtttcgcgcttccggccctcggcaacatctggcagtccgcgctcaaggagacgtcgcttctctcggtcatcggtcttgttgaactgctccgccaggccgggaccgccgccggatcgacgcaccagccacttctattctacgccgttgccgcggggatgttcctgatcataggaagatccaccggcttcttcattcggcggttcgagaacactctagctagaccgtggaggcgctgatcgtggattggcaattcatgtccgaagtcctgcaacaacttcttgcaggactcccccttacaatacaattgactgctatctcacttgcggcggggttcgttttggccgcggtggttttcggcgccacgaacagctcggtgcctccacttcgctggcttgcgctgctccacatcgagctgtttcgcgggacgccgctgcttctgcagatatttctgatttactacggtctgggacagatcccattgctccggcactccgtcctttggcccttccttcgcgaaccctattggtgtgcaatcgtagcgcttgccctaaacacctcggcctacacggcagagatcatccgaggcgcgatccaggctgtcccgcaaggagagatcgaagcggcacgcgcatgcggaatgtccggattgatcctgcgtcgtcggatcatctggccgatcgcccttcggcagggtcttccggtttatggcagcgaggtgatccagatgatcaaagcaacgtcgcttgcaagtatcgtgacgctgaacgaggtgactgggatcacgtacaagctggtctcttccacctatagggtcgtcgagatcttcgccgtcgccggggcgatatatcttgctttgaatttccttgtgagcgccggcttcatgctgatcgaacgctcacttcacgcccatctcgcgcatcggcgcgcctgatgacaaccatggagaaactcatggccaccacaaatagcagcgtggctgcctcccaagcgagtggagccgcagcgattgcggtggagggtctgcacaagcacttcggcgacctcgaagtcttgaaaggcatcgacttcgacgccggcgacggcgaagtcatttccattctgggagcgtctggctccgggaagtccacctttcttcggtgtctaaatcttttggaacttccctctgctggacggctgagcattctcggtgaggaagtgcggttgcgctcgaactcaacgggactccacatcgctgaccggaagcaggtcgatcggctccgcacccaggtcgcgatggtcttccaaaacttctgtctctggcagcatatgaccgtgctggaaaatcttctggaagcgccggtgcacgtccagaatagaaaacgcgcggaagttcgcgatgaggcggaggctatgctcgaacgcgtgggcatgaaggagcgcatgaaggcatacccggcacagctctcgggggggcagcagcagcgcgcggcgatcgcacgtgcgctagtcatgaagccgaaagcgctgctgttcgacgagcctactagcgcgctcgatcccgaacttgtcggcgaggtcctaaaggtaatgagggatctcgcctcggaagggcgcacgatggtgatcgtcacccacgagatggcgttcgctcgtgacgtgtcaagccgaatcctcttcctggaaaaggggcgcatcgccgctgagggtgcgccgaaagatctttttgggggcggtgtgaacgagcgcttcgatcagttcatctcgcgatttagtcaaggctgaagcaattacagaaagcctaacagcgttcccctcgaaggtacatagaggactaatggcagaacaaaggaatagccttatgatccagcggtttgagactggcaagcgaatgagccgggtggtcacgcacaacggggtcgcctatttagccggattgacggccgatgacctcgctgaggacattgcgggtcagacgaggcaagtgctcgcaaaaactgaagcaagactcgccagcgccggaaccgacaaatcccgattgttatcagccacgatctggctccgccatattaacgacttcgatccaatgaaccgggtttgggaagagtggattgatcctgccaacccgccgacgcgagcgacggctgagtgcaggcttgccgacgacgatatcttaatcgaggtcatctttaccgctgcgtgctgattggcttcctgtcttcagcggatgcggtgatcgattcggcgcagcctggtgagggaacagtctcgacaatcatcgcggttctaatctgcagagagttgttaaatcaggtcagtggcatgcaatagcagcgagattgcgttatggaaccgtggatactaccgccatttgaaaagacctgccttgggtggattgcccagggaaagacagtatcggacatcgctctgcttgagggtaagacggtcgcggaaatccagcattacctggagcgagctgtgttattgctcgatgtaatatctatagcggaggctgtcgaaaaaatgaaacgcctcgacgaacatgcaccggcgtccgccacggatgcctgatccgttcgcagattgatggtgggacaagctgaggcgctacatatgatcagtctcacccacttcagataggagccattgctggaagaggtcgacaaccgagctcgtccgtttttcttctggtcggacaacataataagcgttctctgtcgacatggctaaatttgcgatcggagccagtgcgcccgatcgtacctcgtcttcaatcaaatacgtcggcgatagcgctaccccaagtcctgccacggcagctgccgtgatcatggagaattggtcgaagcggagtccgacgaacgcgttttcaacagacagatcgtgaactcggcagtattctgcccaaagcttcggtctcgttgtgaggtgtaacagcggagcttgcgagaggaaatcagacgtctcacccttaagccgatcggcaaggcgagggcaggcaacaggcagcaccttttcgtgacaaagaaacgtggacacgccgccggcccaagtcggttgaccgaaatgaattgccaggtcgaaattgtcctcttcgaagctgaacggcttcgcgcgagattccacagtaatcgccacgtcctgatgatgggcaagaaaactgcccagccgtggcacaagccactttgcgccgaaagtgggaagggtcgcaattcttagggacgccttcatctgtccagcagcaacggctccgatcataaatcgctccgaacgggcgagcagctccttgacctctgggagcaaacgtcgtcctgcctccgaaaggatcaccctccgccggatgcgttcgaaaagcttcaatcccgtttgctgctccagctcagatatctgacgacttaccgcgctctgggttagattgagttcctccgcggctctcgaaaagttctggtggcgagcggcacactcaaaagcttggagattaacaatgtccggaacaagggcccgccgcatatctattccattttcgcatcaagttagcagaaagtctcacagtacagggttgctatcgggccgtatagtgcatttcgagcatgaagtcctaccgttttcgaaggttgagcaaaatggcgaagcacgtcacgtcgagcgaaatccggtcgtctttttccgcggccatgtcggccatgtaccgcaccgaggttcccgcttacggaacgctcatggatctggtcgcccgcgtcaatgacgaagcgctttcagccgagccggaactcaggactcgtctcgaagcgaccgacaatctggagcgcatttccgaggagcgtcacggcgcgatccgcctcggaacggctgaagaactggcgatgatgcgccgcgtcttcgccgtcatgggcatgtatccggtcggctattacgatctgtcgaccgcgggcgttcccgttcattccaccgccttccggccggtaggcgacgcggcgctgaagcgcaatcccttccgcgtcttcacctcgctgctccgcctcgatctcattgtcgacgcgcagctgcgcgaggaagcggcaaagatccttgcgacgcgccgcatcttcaccgatgaggccatcgagctgacgacgaaggccgaagagcaaggcgggctgaccagggaagaagccgatcgcttcgtggctgcagtgctcgaaaccttccgctggcacgacaaggcgatcgtcgacgtcgcgatgtatcatcgtctgcatgacgcgcaccgcctgatcgccgacgtcgtgtccttcaaggggccgcatatcaaccacctgacaccgcgcacgctcgatatcgacaaggtgcagagcctgatgcccggctacggcatcgcccccaaggcagttgtcgagggtccgccgacccggcgctgcgccattctgctgcgtcagacatcgttcaaggcgctcgaagaaggcgttgccttttcggatggcaagggtggctggcagaccggctcgcatacggcgcgtttcggcgaaatcgagcagcgcggcatcgcgctgacgccgaagggccgcggtctctacgaccagcttctggaacagtcgcgcaaggtcgtccgcccggccgccgacggctcgaacgctgaggcctacgaggcagcgcttgccgccaccttcgaagcctttccggatgactgggtggcgatccgcgccgaggggctcggctatttcagctattcgctgaccgagaagggcatgaaggcatcgacggatgcggctgacatcgaaaccctggtttcagaaggtctcgtccagttcgacccgatcgtctacgaagacttcctgccggtcagcgctgccgggatcttccagtccaatctcggcgatggcgcgcagcaggaattcgttgccagccccaaccagcagcgcttcgagaccaatctcggcgccaaggttctcaacgaattcgatcactatgcagggattgagcaagcatcgatctacgactgcctttcgaggctctcgcgccgcccggcggctcagtaatcgtcaaacacggcagcaatccgcacattggagtccggcacatgaacatttccgtaaagtccccttcggtcctcgacgaagcacacgtcattctcgatcgtctcggcgtcgacaagtccgcctataccgatggcaccatggtttccttctcccccatcaccggcgagaagatcggcaagctgaagaccgtcgatgcgaaggacgcaggcgccgcgatcgaacaggcgcataccgccttccagacctggcgcctgacgcctggcccgaggcgtggcgaactcgtccgtctcctcggtgaagaactgcgtgccgccaaggccgatctcggccgcctcgtctcgatcgaagccggcaagatcccgtccgaaggcctcggcgaagtgcaggagatgatcgacatctgcgatttcgccgtcggtctttcccgccagctctacggcctgaccattgccaccgagcgccccggccaccggatgatggaaacctggcatccgctcggtgtcatcggcatcatctccgccttcaacttcccggtcgcggtctgggcctggaatgcggcgctggctctcgtctgcggcaacagcatagtctggaagccgtccgaaaagacgccgctgacggcgctggcatcgcaggcgatcctggaacgcgcccttaagcgcttcggcgacgcaccggagggcctgaccgccgttctgatcggcgaccgtaccatcggcgaagtcatggtcgatcatccgaaggttccgctggtttcggccaccggctcgacccgcatgggccgcgatgtcggcccgcgccttgccaagcgttttgcccgggccatcctcgaactcggcggcaacaatggcggcatcgtctgcccgtcggccgatctcgacatggctctacgcgccatcgccttcggcgccatgggcaccgccggccagcgctgcacgacgctgcgccgccttttcgtccacgacagcgtctatgaccagctggttccgcgcctcaagaaggcctaccagagtgtttctgtcggcaacccgttggaatccaccgcccttgtcggcccgctggtcgacaaggcagccttcgacggcatgcaaaaggcgcttgcggaagccgccaagtacggcggagctgttcatggcggacagcgcgtcgataccgacagtgagaacgcctattacgtcaagccggcgctggtcgaaatgccgaagcatgaaggcccggttctcgaagaaacctttgccccgatcctctatgtcatgaaatactccgactttgacggcgtcattgccgatcacaatgcggtcggcgcaggcctttcctcgtcgatcttcacgctcgacatacgcgaggcagagcgcttccttgccgccgacggctccgattgcggcattgccaacgttaatatcggcacatccggcgccgaaatcggcggggcgttcggcggcgaaaaggaaaccggcggcggtcgcgaatcaggctcggatgcctggcgcgcctacatgcgccgtgcgaccaacacgatcaactattcgaaggccctgcctttggcacagggcgtatccttcgacatcgcataaggtggacctgtcatgacgatttcagcgaaaatcgaggaggcggacttccggcccgcttcgcggatcgcatcggtcggcgtttcgaaaatcctccagatcggcgcgaaggcggccgccatgaagcgtgatggccatccggtcatcattctgggcgccggcgagcctgatttcgacacgcccgataacgtcaaggacgcggccaaaagggcgatcgatgcaggcgagacgaaatacaccgctctcgacggcacgcgggccctgaagaaggcgatcgtcgagaagttccgccgtgagaacggtgtcgattacacgaccgaggaagtcacggtctcgaccggcgccaagcagatcctgttcaacgccttcatggcgagcatcgatcccggtgacgaggtgatcatcccgacgccttactggacgtcctattccgatatcgtcgagatctgcggcggcgtttccgttctcattccctgcgatgcgaaggcggggttccgcctgcgggccgagcagcttgaaaaggcaatcacgccgaagacgcgctgggtgctcctcaactcgccgtccaacccctcgggcgctgcctacagcgccgaagactatcgcccgctgctcgacgtgcttttgcgccatccgcatgtctggctgatggtcgacgacatgtacgagcacatcgtctacgacggtttccacttcgtgacgcccgttgccatcgagccgcggctgaaggagcgcacgctcaccatcaatggcgtgtcgaaggcctacgcgatgaccggctggcgcatcggctatgccggcggccccaagccgctgatcaaggccatggcggtgatccagagccaggcgacctcctgcccctcctccgtcagccaggctgcttcggtcgaggcgctgaacgggccccaggacttcctgaagggccggcgtgatagcttccgccggcggcgcgatctcgtcgttgctgccctgaacgccatcgacggccttgactgccgcgtgccggagggagccttctacaccttctcgggctgcgccggcacgctgggcaaagcgacgccgagtggcaagaagatcgaaagcgatcaggacttcacggattacttgctcgaagacgcgcacgtggcggtcgtgcccggatcggccttcggtctctctcccttcttccgcatctcctacgcgacatcggaagcagaacttgtcgaagccctgggccgaataaaacgggcttgcgaagcattgcagtcctgatcgcaaagcccggacagaggtcgcattatagaacatgatcccacgtctccgctctgatcttgatacagtccttcccgaagctagcttcttcgaacgccttatggaggctggcttcacaggggacgttgaggtcggcgctgcttctcggacggttttttcgaccgataactccatctaccaaatggcaccggcgggaattgtctttccgaagggcgtcgaggatctgaagatcgtcgccacggtcctgtccgaacctgcttttagcagcgtaaccgtagcgccgcgtggtggaggcacaggcaccaacggtcagtcgctgacatccggggtcgtggtcgactgctcgcgccatatgaaccggattctggaaatcgatccggtccgaaaaatggctcgcgtcgaagcgggcgtcgtcaaggatcaactcaaccgcgcgctgaaacctcacggacttttcttcgccccagagctttctacatcgaaccgtgcaacgatcggcggcatggtctcgacagatgcgtgcggtcagggatcttgcgtctacggcaagacctcgaaccacgtcttgggtttgcacgtcgtcctgatggacggatccgagtggtggtcgcggcccttggacgatgccgggcttgccgatatcgtgagccgcgaggatcggatcggcgacatttaccgaaccgtcgaacggattggccgggagaagcgcgaccgtgtcgctgagatcttcccgaagctcaatcgatacatgaccggctacgatctcgcgcacatttgccaccccgacgggggctttgatcttaacgccatcctgtgtggctccgaggggacgttggtgatgatcgcggaggtagagctcaatcttttgccgatcccggcccatgccgccctgatcaacatccgctacggcgactttaactccgcgctggaggatgcacgtaccctcgccggcctcaaggtggcctccgtggaaacggtcgatgagaaggtgctcggcctcgccaagaccgacattgtatggaatggcatcgcctccttctttcccgaggatgaggaggggtccgcggatggcattaacatcgttgaagtgctcgccgatgatgcggcggagatggagcgcaagctaagcgagattacctcggctctcgacggaagtgcttctgcacgccaccgaggctacaccgtggcccgtggccatgccgacgtggaggcaatctggacgatgcgcaagcgcgcggtcggcctcctgggcaatgtggaaggacctgtgcggcccgtacctttcgtggaagataccgccgtgcccccggaaaatctcgcggcctatatccgcgaatttcggttgcttctcgatggcgccggcctttcgtatgggatgttcggccacgtcgatgccggtgttctgcatgtgcggccggcgcttgacttgacccgggaagatcaagtgccattggtgcgggacatcagcgacgccgttgtggcgctgacccgcaaatatggcggtgtgctctggggcgaacacggcaagggcgtgcgttcggaatatgtgccggagttttttggcgatctctatccaagccttcaggagataaagcggacctttgatccccaaaatcgtcttaatcccggaaagattgccaccccgggttctcagcccctactgaaaatagaccaagtcccacttcgaggagccgttgaccgcatcattggcaacgaaatccgtgccgccttcgacaatgccgctcattgcaatggcaacggtgcctgcttcgatttcaatgagacgagtccgatgtgcccatcgtacaaggccacgcgcgatcgacgtttttcgccaaaaggacgggccgccttgatgcgggaatggttgcggttgctcactgaaaacggacttgaccccaggcatgaggccgaacgcatccgccagacgcatccgctgctgggcctgccgatacggcttttcaacagtgtcgatccgcgaaatagaaatgacttttcacacgaggtccgcgccgtgatggacacctgcctcgcctgcaaggcgtgcgccggacagtgttcagtcaaggtgagtgtaccgtcgtttcgatccaaattcctcgaactctaccacgaccgatatctccggccgttgaaggatccactagttgcggccatcgaaacaacgctgccgtggatggcgcgggtgaggccgctctacaatttattggccgccacgagagcaggcaaacgaattctccgcgttgcggggctcacggctttgcccgtgcttcctcgcctttcccttcgccgcaaggcagcccgtctcggcattgcccttgctacacccgaccggctgggacgcttgtcgcctgaggacagacggcgcgcggtgataattgtacccgacgcattcacggctcatttcgatccgggggtcgcgctggctgctatcaacctggccaaaaaggcggggttcattccgtttctcaccgccacccatgtcaatggcaaagccctgcatgtgcatggctacctcaaccgcttcgagaaggtcgcggaaaaaacctcggcctatctgcaaagcatcgccggcttcgacattcccctcgtcggtctcgatccttcgatgacgctcgcctatcgtagtgagtaccagggagtaaccagtgccaagctgagcggccaggtgctcctgccacaggagtggctgtccgctaatctcggcgtgctggccgcaaaagctggaccttcacgggaacgacgctttcggttgatgatccattgcaccgagcgcacgaatgctcccgcatcgacctccgagtggaaagccgtcttcaaagccctcggtgtcgatcttgaaattatggatgccggctgctgcggcatggctgggacattcggtcacgagacccgcaatcgcagtatttccgaacggctttacatgatgagttggaagcaggaggtcgatacggccgatgggcgcaacgtgcttatggcaaccggctattcctgtcggtcccaggcgaaggaaatagatgcggtgcggattccacatccgttcgaagtgatcgacacgctcatcagttagatcgtctcccggaggtcgcaaaacaaaaacgcccggccgcgtttgcgggccgggcgtgacattgaagtctgggaattggcttagccagcgtccttcagccgcacagcctccggattatagacttgtccgaaccggttgttgaggaactcgccgagtgaaatcccctcctgccggacaaatcccttctggggaagtttgccgttcgccagcaaatcgaggacggtcgtgataccggccgcggtggtgatctggatggcgctcatcttcttgccggcgacgacgctggcatagactttgttcgcgtaggtttcctgcagataacggccgtccttccagccgcagacggtgacgaagatcacgacgacatcttgcatggtggcaggcagggcgttttcgaacagatccttgagtacgtcccgtcggttcttcaagttcaggtcgtttagaagcgctttgatgatggcttggtggccggggtaacggatcgtgcgatagttcatcgtccgcacccgtccttccagtgatttggccagtgtgcccaaaccgccggatgtgttgaatgcttcataggtcacgccgtcgagggagaactcttcgcgctcttccatggccggtacggtgacaagcttgccttcgacaactgcttcacagggctcaatatactcgttgatcagcccgtccgtactccaggtgagattgtagttcagcgcgttcgacggatattgcggcaacgccccgacccgcatgcgaacgctatcaaggctgtcgaaacgctttgccaggtcgttggcaacgatcgaaatgaagcctggtgcgagaccgcactgagggatgaaggcagtgctggcgttctcagccagttcttccacctttttggtcgtcgcgacgtcctcggtgagatcaagataatggacgccagcttcgagagcggcttcggcgactttgcccgtcagattgaaaggagctgccgacaggactgcaaactttccgctgaggacgtcaacgagagctttgccgtctgcaatgtcgacagtcgcaacagcaatcgaggggtgttgatcaaccttggccagttgcccttcgtccctatcagtaacgacaaccttgtaatcgccggtttccgcaagcatcagagcaatggctccgccaatcttacccgcgccgataaccactatttctttcatacaaatcccctgtgttctgtatataggatatttataaaaataaccggggattggtcgaatcatagcggcaaggtgggcattatgttatatatttttgtgcaaaaagacgactgcacttggtaatatgaaggggttccgcatgcaattgaccgaaagggatcgggagctcctgtcgttactcggcgaaaatgccagaacgcctgtggcgacgctcgcgaaaaagctttctctatccaggaccacagtgcaggctcgcttggagcgccttgagagagagggagttattgtcggctatggtgtaaggctatcgaatgaatattcctcgagcttggttcgagcccatattctgatcaccatagcgccgaaggcgctttcacaggtgacggcctcccttgggaaggtcacggccgttatcgctcttcattctgtgagtggcacttttgatttgattgcgattatcgaagccccttcgatttcagagctcgatcagttcatcgatcaaatcggcataattgaaggtgtcgagcggacgctctcttcgattattctttcaacacgcatttcacgctgaaagagcaagaggccacagccgtgcgcctgctgccacctttccgacgatgaccatgcagaacttacggcctctatgtcggtgtattccacccaccgacgcgccatttccgtgtgcattaagataatgctttccgccccatcggattgctgttctgacatggtatatcattacgacagccaatgtttggcggctcgtacgaatcatcaagcggtcaacctgtgctgtcaaccgtcacgatatgagcaagcaactcaaacgctttcctattcaccgcacgcgcgttgttggctgtttggcaggatatatgccaacgtaaaaatgagggcaatcgattgtactgaatcggattttcaagggtctggccaaaactattccgtgggcacctggcacacgccctggagtccggcccgtttccagttgagggttgtctacgcttagatgagaaggaaagttgtccaagacgaatcccagtgtcctattaccaatagccggcgctagtttgatttcagaataaagagaaattcgtcacaccaaatattagaagcaatgtttgattgaccatcatacttaagatgaacattccaaacacagttataatacgcattattattgacacaatataaaattataatgttgatattccttgaaatataatattacaatagataaagtagaggaaattatgtcagaaatttggtttggctctgcttacgacagagtcggacgatgcctaaagtctattgcttcttctatcgctagtccaattgctaacagacgttcatccgagcttgcagagccatcgatttccatgccaataggcagaccgttggaactaagagaaacgggaagacttaggcccggcaggcccgcattactgctgggatctacattccgcacgaagattttaaaggtatcggtcattgagccattgtgaatcaccgatagatcatggccaattggcttggctgtcaacggagctgttgggaaaagaattgcatctagctgatgcgccttgaagtaactgtggtaggccgcttggagtctcggtctgaaaaaacgtcgcgccagacaatactcgcttttggaaataagattatccgagagttgtgcattgagaatacttgcaacatccggactgcgaatcgctctgacaacctcagaaaaggaaacaccctctacgaagttctgaatataatgttcaagggacaacggaaattcgtagatggcagtcggaaagctgaccccttcattgtgatgcgctaaatcaggaatatctgcttcaacaaaagtaacatctttgcgtgccagaactctgataatcgtctcggctgctaaggcgacatcgggctccaggtcgttgtaaaagtaagcggttggcaagcctatacgcagccccttcaggcggaccgtttgattaaccggcggtctcccgcaaatgataccgtcaagaagaatcacgtccggaacattctgtgcgataacgccaggggtgtcccgggtggggcttaccggaactattccgtccgttggatatcgccccacggtaggacgaaaccccaccacgccgcacaaggcggccggtaaacggaccgacgctcccgtgtcagttccgacgccgcccagcatcaatcggccggccaccgcggcggccacacccccacttgatccccctgggatgagactagggttccacgggtttcgtacggcgcctgtggcggagttgttgctcgtgatcccaaaagacaattcgtgcatgtttcccgaagcgccaggcagtgccccagccgcgagaagttgtcgtgcaactccggcaggcgtcttgggtttgtggttctgtaagcctggcgtaccagcggtcgcggcgaacctgcctgtcgcaatattcgctttaaagcataggggaacgccagctaggccaacaccggcacctccgtgttgatcgattttgctggcagtccaccgtaggtgcgcccagtcggtttccagaaaggcgtttaaggatcttgctgcttcacagcgggctattatcgtttcgattaactcaaagcacgagtattttctttccctgagacatttaagcgtctcggtgatcgaggagagggtcaccattttcgttgtgctgagggaactgagatagatctcgccagagaaacgttcaatgatttttgcttggagtgaaaaaggcaaataattatagaggaaggaagtcagaaatggctgcgcagtagggccacttgtataagtgccggtcgaacactgctggtggaaagtcaaaagcgtgaagtattagttgaactctgttactaaattgagataaatgggatattttattcgaaagtactgtttgagatctagcgacaataataatgtcatcttatgagattgcatggcaatatggatctaatatttggcataaatagatggtggttttgtctccacttttaaaccttcacagcgttaccctaacacctcttaattgcgtacactcctttcaaccgcatcaatggctggatcctccttcacattgccatcaactggctcagcgccccttgatatgatgcttatcgatgattcagatctgctgcaattgggtctccagcaggtattctcgaagcggtacacagagacaccgcagtcacgctacaaactgaccaggagggcttctccagacgtctcatctggcgaaggcaatgtgcatgcccttgcgttcatatatgtcaacgctgagacgttgcagatgatcaaaaacgctcgatcgctaaccgaagcgaacggcgtcaaagatcttgtcgccatcgacgttccgccatttcgaaacgacttctcaagagcgctactccttcaagtgatcaacttgttgggaaacaaccgaaatgccgatgacgatcttagtcacttcatagcagttgctctcccaaacagcgcccgctctaagatcctaaccacggcaccgttcgaaggaagcttgtcagaaaacttcagggggttcccgatcactcgtgaaggaaatgtggcatgtgaagtgctagcctatgggaataacttgatgcccaaggcctgctccgattcctttccaaccgtggatcttctttatgactatggcaagttcttcgagagttgcgcggccgatggacgtatcggttattttcctgaaggcgttagcaaacctaaagtggctataattggcgcaggcatttccgggctcgttgcagcgagcgaactacttcatgcaggggtagacgatgttacggtgtatgaggcgagtgatcggcttggaggaaagctatggtcacacggatttaagagtgctccaaatgtgatagccgagatgggggccatgcgttttccgcgaagtgaatcatgcttgttcttctatctcaaaaagcacggactggactccgttggtctgttcccgaatccgggaagtgtcgataccgcattgttctacaggggccgtcaatatatctggaaagcgggagaggagccaccggagctgtttcgtcgtgtgcaccatggatggcgcgcatttttgcaagatggctatctccatgatggagtcatgttggcgtcaccgttagcaattgttgacgccttgaagttagggcatctacagcaggcgcatggcttctggcaatcttggctcacatattttgagcgagagtctttctcttctggcatcgaaaaaatgttcttgggcaatcatcctccggggggtgaacaatggaattccctagatgacttggatcttttcaaagcgctgggtattggatccggcggattcggccctgtatttgaaagtgggtttatcgagatccttcgcttagtcgtcaacgggtatgaggataacgtgcggctgagttacgaaggaatttctgagctgcctcataggatcgcctcacaggtaattaacggcagatctattcgcgagcgtacaattcacgttcaagtcgagcagattgatagagaggaggataaaataaatatcaagatcaaaggaggaaaggttgaggtctatgatcgagtactggttacatccgggtttgcgaacatcgaaatgcgccatctcctgacatcaagcaacgcattcttccatgcagatgtaagccatgcaatagggaacagtcatatgactggtgcgtcaaaactgttcttgctgactaacgaaaaattctggctacaacatcatttgccatcgtgcatactcaccaccggcgttgcaaaggcagtttattgcttagactatgatccgcgagatccaagcggcaaaggactggtgttgataagctatacttgggaggatgactcacataagctcctagccgtccccgacaaaagagaaaggttcgcatcgctgcagcgcgatattgggagggcattcccagattttgccaagcacctaactcctgcagacgggaactatgatgataatatcgttcaacatgattggctgactgatccccacgctggcggagcgtttaaactgaaccgcagaggcaacgacgtatattcagaaaggcttttctttcagccctttgacgtaatgcatcccgcggacgataagggactttacttggccggttgtagctgttccttcaccggagggtgggttgatggtgccattcagaccgcatgcaacgctacgtgtgcgatcatttatggttcgggaggaaccctcaaagaaggtaatccactggcgcacgcttggaagcggtataggtatcaagcgtgataatgcaacagttagaataattagtttgccctagccggtattccttggtgttccaatagggttccgaagccaataggcgaaaaagctgacttttcagtcccttttattattcaattcgcttcggtccaagcataattgtaacgctacgtgatagaaaaatggaaattgacagattacttacttaaattaatataatctattaatatcgtcaagctaaaaacatgtaatacgtaaatatatggaaactttatgtctgaaaagaccacattattattgatcgtaatacactgaactggtcataacagggaaggctaactgcaacatatcctataaatactcagtgaaaatggccgctccccaatgttaagccatttttgcggtcgggctaagcgctcgtccgtgtctcccctggcccgagtgtcggctctccatcagcggcctcatcatctgtcgctgacaccggtggccccaatttcaaatcgaggaaagacgatgccctcgccggcaaacgtcgactggtggcattctccgcgaacttggtgaacccataagccacgacatcatagtcgcggtctcccgtcgcctggcggataagaaaggggcacaggacctcgtcgccatagatgtccactgctcgtgcctcgtaccaggaaacaaacaaagtgctggaaaaaatagcaacgaagcagtccatatctgattctttggtttggcggcgtcgccaagcaaggttgtggaccctagccatctctccgcgtgatagttcacttcgatatggctgaatagatgtcgcgactgccgcctccgtcccaaccaagaagcgccgattaaacagcagttcctgaatcttctcgcaggaaacatagatgaataaatattgctgcctctcaagcgctaggtccaatgggtcgtgcgctggggaatggtagcatacttttcgcgtaaggatttctgcattgattttgagttgattaactggatatctggcttcaaccatgttgagaaccctctcggcgaaagccttctgaaaacgcattatctcaccacgaaaggactggttgtagctatcgaaggcatcttgaagctctctgagcagtgttgtcgcatcttgggaatggcagaggttacgcggcggaaagtatggacgaattaggagccgcgagcccatagtattgctgaggtgggaatgtttttttgggccatgcagcatctatccaatttaagaacggcagaaatgacagccgcagaagcgcgctacagtacttggtcgggaaaacgacgttgtaagtctggtagcagtctaaatctggtcaagaaaagtgatatcacatcgacaaggcatgccgaaaacctggataatcagcaagtggctgtaaaggaaatatggtaaaattaggcgaatgaccgaatgtattgatgtcaggcatcgaactttgagccatttcctacattagggacacgtagtccgggctgaatgtgaaataaaagacctttatttgaacattgtacaggaatagtgttgaaaaagtgaaagatgtctcaagctccactaagtaaaggtgttgccgtttgatcgcggtataaagaatctgattccactttaagtttggtttattacgcggacgggatggtgattaaccgtgattgttgaatatctagttcactatttaaaaaatgttctgaagtagtatgcttactttcgtcaaagcgcaacgcgtccactaacagccgccttgctgccaccaagtcgtgactcacgagcacggaggtgtgtggccacgtaattctatagccgacgggagtcccttactaatatctcgagtcagcccggaattactatttcgtcgcgttgctgctcaagcattccaaggcgagcttatttagtgtgatgatgttacccgtcgtatctatcaaatatagctccgagataacttagggcaggttgatattaatgtttaaatagatagagatctcttattcagcgtcacaattttcttctgtgtcaaaaggatttctgttttcgtttatctagcgtcaaatagaacaaaacataagaacagaatgaggaacgtaataactgttattcaggtgttgataacgtgattgatgaaataatacatatataactgcaatatacggactgtcgcaggtcgagagatgacaccggaagtgatatcttaatgagccaaaggatagactcgcccagggtgagacctaggtccgccttagcacggcctccctagctatattggtaaattcaggcgcaagggctttccaaacggccagagctacggctctggacggtggagagactggttgatcgaaaagttggctgaccgctccaatttcccaattatggaggccggctcgttcaaaagacgtcaacgaagcagctcacccgtgctccaacgatgtgggtatgcatcgcacgcaggcttctattggcgagcatcagacccatatgcctgagagaaccggccggcttcatcttccgacgcaatggcttgtgtgttcacaagcgcttcttcggaccagctctgaattgccaagcaaggagagcggtataaatggtggaagttgagtgctggcgtgactcaccctcaagattagtggggcagttggcttttattgctattgggtcatttcctgggcgtgcacggaaacctaacaaaggtagtaatcgtgccagtagtggggcaggagaatattatgcatagctgtcagcatatttgttcgtgatttttaattggaaagtgaagcgaagattcccagtatgctgccaaattggatcgcactcacgcgcttggtgtgcttttaaaattcgggtgtctctaaagtgctttttcttatcgttgatgcgttcaataaatttaactcactttaggaaggctttctacaattatctcaccgcaaaaatgaaactccttaaatcgcagaatgaggccgcgtttgacatgttaaatatttaacttcacaaataatccgaacagcgtatgtataaaagtgacaaaacgaaataaaagaaagattaaagttggttattaaataacaattaaacgagcatggtcactggttccgcagcaccaagcacgaaaatggaaaatcgacctagtcctgatcttctgccgaagcattcgtcgatccatctcactgccgataaaaggagctccccttaggctgggtgacaattgtagtagtcaaactttcccatgtgtagcagcggatccagcattgttttcccggtggcctccgccagggcgggtgcccagggcttcaaaaaggcttcgcagatcattggtccgacaatcgctccaatttggggatcaatgccagacatatcaaagcccgttgtctcgatgacctgaaagcttatctcgccctctttgaatcgcatgtcgaagaaggtcttcacatccaacatttgaggtctgctggcatcatcagggattattagaatgtagtggctccgcttggctgtgcggacagtctccacaaaactgtggaagaaatcggcaccatccactgtatggatttcaaacccaaacctctcctgtaggacgcacagcccgaacgcatgaggaacaatccctgcgcatcccgaggcgatgaaatagagtggatgatcgtcggcgaatcttgcagcaaacgctattccaggctggacgcctttttccgcggccttaaacaaggcagctggaagtacctgcagagatgaaataagagccggaagcagtgcccagttctctctttcgttcagaataccaccaataagagacagcatcagcatatggatagcttggaaagcttgagttgttatccccgtggagaatgtttgatgaccgaaggacgcgagttttgagtttgcagatgccgtgaacacgactgacttgcaagccttgtccttcaagaacgcagcggcttcgacagtttccggcgtcatcccggactttgaagacaacaccacaagtgtcgtcggatcattcaccattgacgggttggcgcgcatgaggttcacgaaagttgcagaggcatatgcttcatatcggaggtttcgtccgacctggtcagtatatcgcttcaaactcctcgcgatcgccagacctgccccggcagagacgaacaggacgctgctgatactcgacgccgtggcgcgtccaaatttggcgactgtctcgagctgttggagcgtcgcgcgcaactgcccagacatctcaatcgcgctggtagatgaaggtgcatacagcaaatccattgtgctgtatcgagccggcgttctagcggaagttgaatggaagtgtggtttgtttcagaaaactggatgctgactggtccgtgtcagaggcgagctgacttatttatgccattcagcgggcggatcagacgtcgttgtcgttatttggggtaggtgcaccaaccttgctgagatattggttaccgtgtgggcccctctttgaatacatggaactgcgaggtgattggcatgtcaggttacgtcatcgcttacgcatcgccaaagtggcaaggaaataagagagaaaatagacttggtgtcatttagcaggacggatcagaagtcattgattgcggtttggtgcaccaactttgggcctacgacgttggtaccttaggctgcgtcagctatcacgcgctgcccgatattaaaaggcactcgccaaaatccggtcatctctatctcaacaaaccctctctacggtctttcattttacaatgcccctccctcgcgcgtaccttggtactgcccagccaccagccagtgtcaaggagttctacttcgtccgccatggtgcaaccgatctcaacgagaaagaaatgcacttgcaaggtgaaaaacattggggtgtgcagggcgccggcacgaacatcggtctcaatggaactggcaaacgccaagcggttctcgccggcaacgttctccgcaaacttcctatcggcagcgtcgtctgctcgccgcttttacgcgcaatacagacggctttgatcgccaatattggattcctctgctttgacatcgacgaggacctcaaagagcgggactttggcaagcatgagggtgggtatggaccactgaagatgttcgaggacaattaccccgattgtgaagacaccgaaatgttctctctccgcgtggcaaaggccctcactcatgccaagaacgaaaacacccttttcgtctcccatggaggcgtgctcagggttatcgctgcacttctcggcgtggaccttactaaggagcatacgaataacggacgtgttcttcatttccggcggggcttttcgcactggacggtagaaattcatcaaagcccggtgatcttggtcagcggttcaaaccgcggcgtcggcaaagccatcgccgaagacctgattgcgcacggctatcgcctcagcctcggcgcccggaaagtcaaagaccttgaagttgctttcggaccgcaagacgaatggctgcattatgcccgtttcgatgccgaggatcacggtaccatggcggcatgggtgaccgccgccgtcgagaaattcggaaggatcgacggtctcgttaacaatgctggctacggggaacctgtaaatcttgacaaacatgtggattatcagcggttccatctgcaatggtacattaactgcgtggctccgctgcgaatgacagagctctgcctacctcatctctatgagactggatctggccgaatcgtcaacatcaactctatgtcaggacagcgcgtgctgaatcctttggtcggttacaacatgacgaagcatgcactgggaggcctcaccaaaacaactcaacacgttggctgggaccgcggtgtgcgggcgatagacatctgccctggctttgttgccaccgatatgagtgcctggactgacctgattgcaagtaaggacatgatccagcccgaggacatagccaaactcgttcgcgaggcaattgagcgccccaaccgtgcgtacgtgccgagaagtgaagtgatgtgcattaaggaagcaacccgttgacatcgaatcgttcagagagcgtccgaagttttgtttttgcttatgtattgttgtcgtttctcaaaatatttcagcgcaatgtttttaatttcatatcgtgatgtttgtaatttgtttcattaattaatgtttgtgtagttcgaaaatagacaaacatatcaataatatattgattcttaatataaggtattaagaccacaacattgtataatttattgaattaataacgaagaacataacggggcttcaaagaattgtgacgtgcgcggatgtcggcgggctcaggcgacgaccgttcttctttcctcagatgttcctgccaagatcaaacggcgtgagcacctcatatccggtttcgctcacgaggaccgtgtcaccgaaacgcgcgccgccgatgccctggacatagacgccgggttcaatgctaaggacattacccacctctagtaccgtctgagagccggccttcagctcgattccgtcccaatcggagtaaccgatcccccgccccgtccgatgcaggaagggggcctcccaaccgctacgcttgattactgccactgcggccgcgtggatctcgcctgccgttactcctggacgcagcgctgccaaagcggctgactgagcttcccgcgcgacatcgataacctttcgcaagtttgcaggcaaaggcttcgaaccaatgggaaccggtcgatcgaaacaagctgcgtggccacggaacgtctggccgcaaaggcaaatctgcgcgatagcgccatcctgcatgatacggcccccgccggaaggatggcatcgggctgtgcgatcggccccgctgcccaccatattcaattggtgcggccagaaccgtggcagttcctcatcttcagctaacaactctccatttcgctcaatggcggcagtaacggaggcaagcgtgaccttccattcggggatgcccggagcgatagcattgcggcaggctagaaattgctcacgtacgatgtcacagctttgtctgatggcagcgatccccgccgcatccttgcaggcccagagctcttgcagcatcggtgttacgtccttgatgtgttctgcgccaagcgcctgcctgactaactcgacattggcgcccgaggtacaattgaagtccaaaccgatcaggcctgggtttggcgcgatccctctcgtatattgagcaagcgcatcttgatttgtcatgggagcagctatcggtccttcccattcaacccattccacagccacaggcgtcttgcagcgcgccgatatttcccgcgcttcactgcggggtgcgacgaaggccggtttgccgtactgttgcagaacaaaccagacaggcctgccgaccggcaaaccccataatccggcaaaatagttatggaaatccgggccggacaaggcaagaacatcgatgcctgcccgtttcatggcggtctgcgcaccttgcaggcgcgtttggtacacctcatcggagggcgaatcgttgacgcgcattgcgcagtttggtgtcggatcggggccccgaggcgattgggaatatattaaatttcgtaaggctttttgctaagttattgatttgctcgtccgaggttggggtagggtcctatttatgtccttcagcgggaagggcgatacttccgagaacatgatgtccacaacgagccacaatttccgctccaatgtcagcgttacattcggcgcttaccaaggaagcagccgcgttaataatgtgggcccccggctctttcacatgagcgagctgacacatagtttggacgccagttgttgctgcttgattatatataattttggccaagtgcagcgtttaataaatcgtgtgacaggatatatcttgtggtcaggtagataaatttgtgtggaggtatgtttgtttaggacggcggtgatgatggcttgcgccttacgtcccgaaagcagtccacgaagacaattgcaatatcggctgtcttccattcccttcgtggcatcttgtcaacgcgcctcgggagctcagtcgccgacgtttcgcgagttcggtatgcaaccccgaccttgcgaagaaccgcttacggaaccgcgctctatgagaaccgccgggagaagagtttccttgggtggggctgaagtctcgccctttaagcgggcgatcaggtcttctgtggcagccgtcgcgagatccctgacaggttgcgaaatcacggtcaatggcggcgttatagcggatgtccagtcggcgtcgtcaaagcagataagagagacatcatcgggaatcgaaagatccatttcccgaagaactccaaggagaacgagggctacggagctgtctgtggccaaaaaagcggtaggtctgttcggggaaatgcagagcgcacgcacctggtcggcgagattttttgtgtcccagccgccgagaacgataaggttaggagaaatctttatttgggcatcgtgcagcgcggcccgataaccatcgatacgttcccgaacggacgaaatcaggtactgctgctccccttgggcgggggcgttagacactaaggcaatactacgatggcctcgcccagtgagcgacgttaccgcctcgtgggctgcacggaaattgtcgaccgcaaaagtgttggcgtgaagaacagggacccgcctgtcaagaaggaccactgggcagcctctctccgatgcgctaatgagatgctccacctcgctgcttgacgttggagagattatcaatccatcgactcgcttagccagaagaacgcgaacagcgtcccgctccagctcgatatcctcatcggtcgtcgctaggatcacgacgaaaccgtgcgcaccggcggtgtccgtaatagcccgaatagcccgcgcaaaatagagattctcaatgtccgctataaccacaccgatcgttttgctacggccggtcgccatgctctgcgcgagatgattgggcctgtaagccaagctcttcgcggcatccgcaacgagttcgcgcgtcttttcgcggacatagccgtaaccgccaagtacccttgcagcggttgcccttgagacgcccgcaacgcgtgcaacgtcggcgattgtcggagcagcgcccgcgcgatcgttgtctttcatgagctgctcgttcccaaagggaggttcttggcgggtgccattttcgagttccttgtcttcctgcacgaaatagctagctcccctcccgcggacctctgcctcagcactattctgttccggttccgccctatgacgccctaatctgtctcgatcaatcgcgcggcagaaggccggcgtttagcgccggccagatacaacgctcctaccgcaagtgcggagcgagcaattctaagtcggcttcactcagcctatcgctcgcgttattacgctggtgccaatacggataaagcaacggtggaatgctgacgtcgtcgagccgctttcgttcttcttccgatagtttcaattctgcggcggccagattatccttgaactgggcctcggttcgcccgccgataatgacggaggtgacgaccttgcggccaattaaccaggctagcgccacctgagctgcggagacgcctcggccttcggcaatcgacactagtgtatcaacgatcttccacaggcggttttcgtcgcgaatcggcggctctttccagccggcaaactggcggctaccttccggcgccgactggttgcgccgatgtttgccagaaagcagaccgcccgcgagcgggctccagacgagtacgccgaggccttggtctacggaaatcggtagcagctcatattcggcatcgcgagcttcgagggtatagtggatctgctgactaacaaagcgctggcgcttatctttctcactgactgcgagtgccttcatgatgtgccagccggcgaaattcgagcaaccgacataccgaaccttgccctgacgggtgagcgtgtcgagcgcttctatcgtttcttcgagaggagtttgaccgtcccattcatgcacctgatagagatcgatgacatcagtcctcaagcgcttcaggctcgcctcgcaggcggcgatcagatattgacgggagagcccgccgtcgttcggcccggggcccatattgaagcgcgctttggtggcgattagagcgccgttcttacgcttgccgccaaagatttcgccgacaatctcttcggacttgccgtcagaatagacatctgccgtgtcaatcaagttgacgcccgcatcgaggcaaagatcgacaaagcgtttcgcttcggaaacgccaagatcgccgaccgtctttgcccaacccacgccgccgaaggtcatcgtgccaatggttaaggtagaaatcttgaggcctgaacggccaagtagacgatattccatacatctcctccttgtttaatcggaattttatcgattggcgcgcccaccattatccgaggcgggccgaattgattagaagctacccaaacacgctcgagccgcggtcagcgggactgaccgaagtgcgaaagcgggcgaagagctcgcgacccatggccttgtgttacgccatcgcacgtggccggcacaccgccggccaccacctgagtcgcactcatagaccgcgctgcgtctttgataatttcgggataggtgccgtagggctgatgagcgctcaacatgtcattgtaagaagtcacaatgcccaagttcagcgccgttgagccggttagcctcgacttatcagatggggagcaggcggcgacactatgggcgaggttgccgctagatagcgcagcacggtggacgcctttctccctctgcgcctcagcaaggccgagatactctcgacgcgagtgcgcgctgcgctgcggtcggtaacaacttgaataggctcgtgaacagacatctggacttcctacggcacccgatattcgttagatacctggcttcagccagccgccgccgggaagaggcttcagagcctgggcgatcggagaaacttcgccgatataaacgcggggatgtcgcgttacgatgaatgcgacatagtctgcaacgtcttcaggttgaagcaactgtgatcgatcgtcgacgtggttgtcagaacgttgctgcgtgtcgaccgctcccgggcaaatagccgtggccttgacaccaaattcgataccttcttggtcagtggtctgggtcaggccgagcataccgaatttcgaggcggcgtagccgccgaactttgcagaagcaactttaccagcgcgcgaaacaatattgacgatatggccgcttcgtctgtcgcacatatgttgaaagaaggcttgggtgcaaaggaaagtgcctttgagattgaccgccatcatgaaatcccagtcctcttccttgatatttggaatggagttgtggatcgccacgccggcgttgttcatcaggatgtcaacagcgccgaagcgatcgaaagccgcctgggccaacgctgtcacctgagatttgtattggacgtcggtctgaacagccagtgcctctgggccgatcgcacgaacctcggcggctacagcttcgacctggtccaactcgattgcggcgaggacaatgttacatccttccttagccaatgcgagcgctgtggcgcgtccgataccgcggccagcgcctgtaatgacggcagttttaccttcaagtttcatttctatcaccttttaagattcccatcctgggcacagcgcgggtaggttggggcgtggtccgtcagcatcgccaaaacagcgcgaggcatgataccgctctcatatggtaccgctctcatagggaatgtcaagaggggattgggcactgtcgcggtcaattacgaactgtcaacggaagagagggagcagcgagctacgcttgcgtaccggacgtgtatgcccagaccataagtcctaatggataatagaatatcggctcggtcccccgactactgggcgacgctcgctttcaccggaacgccgctgactgaaccacgattaatgagtatcgctggaagcaaggtttccctaccagggcctgaaggaccgccttccaaacggccgatgagactttccgtgacggctgaagcgagttccttgattggctgcgagacaaccgtcagaggaggggttacggcaacagtccagtccgcattttcaaaacagataatcgacgcttgtccgggtattgaaagatccagctctctcagaacgcccaagagaacgagcgcgaccgcgctcgtcacggccagaaaggcggtcggacggttagccgactggcagagcttacgaatttgggcagcgagattgtctgtgtcgccgccgccaaagacagttagcttcggatctatcctgatgccagcatcacgaagtgccgctcgatagccgtcgacacgttcacggacaggtgacgtcagatattgttgcccctcatctgcacgcgaattggagagcagcgcaatgcgttggtgtccatgtgcggtgaaagatgagacagcctcatgggcggcactgaaattatctatggcaacagtatcggcattgagaacgggaacgcgcctgtcgagaaggacaaaggggcagcccatgtcacgcgcgctgacgagatgatccaccttgaagctagaggctggagacacgatcagtccatcgacccgctttgcgagcagcacacgcacagccgccctctcgcgttcgatgtcttcgtcggtattggcgagaacaacgtcgaaaccttttgcgttggctgtgtccgtgatagctcgaattgcgcgcgcaaagtataggttctcaatgtcggcgacgacgacgccgatcgtcttgctcctgccggtcgccatgctcttggctagctggttgggctgataagctaggcgcttggcggcatccaggacgagctcgcgggcctcgccgcctgcgtaaccgtaaccgccaagcacccgcgccgccgtggcacgcgagacacctgcagcacgggccacatcagccaccgtcgcctgagggcccgagcgtccgttattcttcatgatctgctcgcatctacattcgtacgcctcgtccatagcagacaagtaaaacgcaaacaaacctcttgactccgtacccgtaaatgtgagaccgctatcagactgagagcgcgctcacatcacgttatagaaagcgaagaacgatgaccatctatcccaacttggtttctcccgatcccgatttccgcaacatcatcgaggctgccgtcgcccagcgcgaacgtattgcccaagtcgccagggcagcagcaagcggagctcgcaaccttttcctgatcggttgcggcggctcgtacaatgacttctccgcagtgtcttaccgatgtgaccgcagcgcgaaaattcccacattcctcttcaacagcgaggagttcaatcgtcgctcgcccgtgcttctcggcaaggattccgtcgttcttgttgcttctcacaacggcaccacgaaagagactattgaggccgctcgccgctgccgcgcttccggcgcacgcgttatcggtttcaccaagaatgaaactactcctctcgccgcggaatgcgacgacgtgttcacgtacaccagcgaccggacaatcttggcgccgaagcagttgctgatcggtatgatggtgacggctcttctaagggaaaccgacgcagatttggactacgcagcgctcgaacaggcttatgcagccgtcccggctgctttcgaaaaggcaatcgaagaagcggaagcaagtcttcatgagattgcggttgcttttggcagcgaagctttgacctatgtcctgtccgccggccccaaccagggcgcaggctatggcttcgccatgtgctatctcatggagatgcagtggaaacatgcctcgtggttcaatgcgaacgagttcctgcatggagcattcgaagtcgtacagccggccacgcctgttcttctgttcaagggcgaggatgatacgcgcggcattatcgatcgagtggagaccttcctcaacaagaacacgcagcgttgccgcgtcgttgactcgaaggactacagtcttccaggcgttccagcatcgatgcgtggagaaatcacacctcttcttctgtcgacattgtcgaggcgtctggccgagcactatcaagctgtcacgggtcatgacctgaccgatcgccgctacatgtttaagacaacttactgaggcactcaaatgcgtgtttgtggcatcggcgacaacgtagtcgaccgctattttaatcagaagttgatgttccctggtggcaatgcggtcaatttcgcagttcacgcccagcgcggtggcatgagcgctgcttacctcggtgttatcgggacagattctgacggcgatctgatccgatcgagcctgcaggcggaaggcgttgagctaaagcatcttcgtgtgaaagaagggccaaatgccttcgcaaccgttcacatggacgacgatggcaataaccgcaaatggggcttgtgcgagaaaggcgtttcgatctttaatctcgatagcgccgatctcgagtacatcagcggttttgacttggttcacaccggtgagaccagtcagttagacggtcagctgcccgaaattcgggagcgggtgccaatctccttcgacttctccgaccgggatctggattacgcagcgagcgtgctgccctttgtaaaaatcgcagccttttcgcgggccggcgccgacgaagccgaaatcgcctgcgtcctggatttcgcccattcggcgggtgtcgagctcgtaacaatcacccaaggcgcgcgaggggcgactgtatctcacaaaggcgaggtcctgttcgccccggcagttgctgtcgatgccgttgatacgcttggggcaggagatgcattcgtcagtcgtcttgcatgccgcatcctaggtggtgtgtcgcttgccgcagccgctaacgacgctgctcagtacgccgcagttatctgcggaacacagggcgctttcggccatgcccggcctattacacgagaaataccggcgtaacagtaaagtgttcgaaagccttgcgagtaccaaaagaaaattggggaacccgatgcaccaagacccgaagatatctaaactgaaatttccgtccgacgcagatcaccgcagtcgcgtcgagcgcgcacaagcagcgatgaagaaggctggcattgacgttcttgctatttccggtttcgattacctacggttcttcaccggtttgaatggtcttccgatcggcaggccgatctggttgatcatccttcgacaggggtcaccgactttcgttgctccccgcagtgaggcgaaggaaatccgagcaaggtgcgcaacgccggtggcggctgaatgggtcgaatgggaagagccgatacccgccccgatgtcccatcaagacgcactcgcgaagtatattgcggagatcgcgccggacgcgcagacgatcggcgtagacttcaactccacttgggcgtcgaatatcgaactggtaaagcaggttctcggcgctgagcgcatcaaagacgctacttcgatgttgcgcaccttgctcgcatttaagaatgccgtcgtcatcgacggtattcgtcgggccacttccatcgtcgctcatcagtatgttgcagcccgtgaagctatcgctcccggtgttccggaatgggaggttacgcttgcttccgttaccgccgcgatcaagcgaagcgccgaattattgaatgaggatgtcgagcagccgcggttctggccgcaccagatgaacatggtagcgagcggccccgaacgtactgctcgctgccattgctctggtggcggtcggatcatgaacgacggcgagaatgtacagatttgcctttgtggccaggttttcgccggttacggcgtttgctttgatcggcctattgccgttggttcgaagcctcttgctgttgagcttcgccgggtcatcgacgctgctcgtaaggctcaagaagccgccttggcaacaattcgccccggcgtggcagcgggagatgtccacgcagccgcggtggaggtgattgagcggggtggatggcagagtcccttcctgcatcggactggtcgcgggatcggttactctgactgggacgggatcgaactcaaggccgactcctctgtcgagcttgaggccggcatggttctcagtgtcgagccgggcatctatgtcgacggcgttggcggggcccgctttggcgacaccgttcttgtgaccgaaacaggatacgaggttctgaccccgttcgagcttggcagggacatctgatgaccgaccagccgcaccccgccgtatccttccagggagtgacccgacgttatggccctgtcactgccgtagacaacctgagcctcgatatcccgcaaggggagtttttcgcgctgctgggctcgagcggctcgggcaagacgacacttctcatgctcctagccgggttcgagatgccaactaagggcagcgtgcttatgtcaggtacctctattacagaggtgccccctcatcagcgagaaatcggtgtggtcttccagaactatgcgctgttcccgcatctgacggcagccgagaatgttgcctatccactcaagatgcgaggcgtcgcgcgcagcgagcgggaggagcgagtgaaggcagctctcgatctcgtcaatctgaccgaccgcggggcttcatatccaatacagatgtccggcggacagcaacagcgcgttgctctcgcgcgatcccttgtcttcagccctgctatcctgctgatggacgaaccacttggtgccctcgatcgaaggctccgcgaccagatgcagcaagagctgaaacgtattcagcatgaactcggcatcacggtcatttacgtgacacatgatcagtccgaagcgatggctatggcggatcggatcggcgtcatggctgggggacggcttctgcaggttgccgatccagagaccatctatgcggctccctccaaccacttcattgcgcggttcatcggagactgttcgatcctgcgggtcaacgctacggacgggggcaggggatacgacatcgcaggtgcaaggcagtcattgccgtcccccgcaacagagcctttcgatattgtcgtgagaccggagaatgtttcgatccgctcgccttcgaaagtcctagcagaatgtacatttggtgtttcggctacgatccgcgagatgacctacctgggagcgggttggcgtgtcgcgttgcaactatccgacgggcagtcactgcttgctaacgtcatgcgtggggatgatctcgccggaagcttggctccgggcgcgtccgtaatcgcgcagtgggcaccagcgtccgtcgccgtacttccgactgaaggatgaacctgaggcggaatatctgaagtgggaaaacccacaacatccagaggagaaaaacgatgaaatcgaacaaattgtataagcgcctctctacgactttgcttgctgccgcgggtgtgatcttcttggcgggtgtcgcgtctgccgatgacctcgtaatttcctcatacggtggctctttccaggatgcccagacaaaggcctacttcgagccatacgccaaagcgagtggcgtcaaggtcaccgggaccactggcaccggatacgccaaggtgaaggcaatggtggaaagcggcaacatcacctgggatgtcgtctccgccgagagcccagcctttgcaaatgaagtgaaggatggtcttcttgagccgatcgactattcggtcgtcaaggctgataatattccggaaaatttccgtaccaagtacggcgtcggctacatggtgttcggcactaatctcgcctggagcaaggacaagttcccgaacgggctcaccccagctcagtttttcgacccgaacgtgaaggggcggcgagtcttgccgtctgatgcgacgtactcgctcgaattcgcgctgatgggtgacggcgtgaagcccgccgatctttatcccctggacgtggaacgtgctctcaaggtgatcgaccgggtgaaggaccagatcatcggctacaagggtgcctcggatatccaagcgctcatacagcagggtgaggccgacatggtctatgcgggcaccggccggatcaaaaacgccatcaaggccggcgccaattggtcgtatagctgggattccgcacttgcagataccgagtattgggctgtgttgaagggcgctccacatgctgccgaggccatgaaatttatcaacttcgccgcacaggcggaacagcaggctgaactcacgcgggctattgcgtacggcccaaccaatgtcgatgcgctgaggcttcttgatccagcagtcgccaaggatctgcctctttatccggcaaacgccaagatcggagccgttctcaactcgaagtggtggaacgacaattacgaggccgtgaaggcccagtggtccacgttcatcatgcagtaacatcgagacagaggaggaaagaatatgacgcagaagagacgagtaaactgggggcaaacctttttgctcgctccagtgttcataatcctcctcctcgctttcgtcgttccactgttcgccattattccccaggcgttcggcggtgatgccggcgcacgtttccttcggatattcacgggtcccgtgtacctcaagataatctggactacggtgcgcatgagcctggaggcaactgcgataacgcttgtggtctcatttcctctcgcctggctgttgagccgggcgactggggtgaaagctctactccttgggttgctggtgctggttccgtttctaaccagcgtgcttgtgcggaccttcgcttggattgcgatcctaggtcaacgtggtcttgtcaatgggacccttcttacgctcgggctgatttcggagccgctcccactccttttcagtgaacctgccgtcgtcctcgcattggttcattcttccatcccgatgatggttttttccctcgttacggtactccgccgtatcgacggacgcattttgctcgcggcgaacacgcttggtgccaacccggtacgagcctggttgggcattgttgttccgctcgcaatccggggcatccagtctggcgtaatcatcacgttcctcttcacaatcgcaagctttatcgcgcctgcgcttttgggtaatcaacgccagcaaatgcttgcgcaggtgatccaggcggaaatcgagactggcgctgactggcctttcgccgcggcccttggaattacgctcgccgtggtggccacgatcgttgttgccgctctgagcatggcggcacgattgttgtcgcgttggcagcgtcccggccccttgccggacgagaccctcaaacggaaggcagagagagcggacactacgctactacgccggagggtagcgttgccgaccaggcgccctgtatcgtctgcgatttggagacttggcgctaggctggtcgagccggcgtatctcaccgttatatcagtgttcattctgctcccgttgcttatactttttcctgtatcgtttagttcggcagacgttcttatcttcccgccaccaggctattcgctgcgatggttcgaggcgattctgagtagccctgaatggatcgcagcagcactcacaagtctccggatcggcgccgtgacctgcatcctaagccttcttctggccacccttgcggtcctaggcttcggccgccatcgctttctgtttcagggcgctctcgaggcaattgtacagtcccccctgagcgtgccagcggtcgtcttcgcgcttggagcttacctgacgttcgcgcgggtggggctggtggacacagaggcggggatcatcatcgctcacacggtactcatcttccccgtcgtatatctcgtggcatccgcgacgtatagctccatcgatccccgtctgtcgctggccgcagcgagccttggagccaatccatggagcatctttcgtaccattgtctttcctctattgcttccaggtctggccatcggtggtctgctggcaacgctgctgtcgttcgatgagtcggttgcgtcgatctttctcagtgacctttcagtcaagacacttccgagaaagctgtgggaagggatccgcttcaacacgagccccgagtcagcagccgtctccgctcttctgcttggcgtgacatgcactgtgatcattgttggcatggcagtcgttctggggcgcaagagagttgcgggtggaccgagcgctatcgcggtgctcacaaaaactaccgaggaaggtcaatgatcagtttatcgttcttcgtgcctcccaaggcgacatggctgccgtcggaattcgccggcggcagcccctggataacgagttccttcacattggttcgccccggtgattgctgaagtcacgcacgcagacacgataggaaacgcagtggaaagaacggctatggaaacgatcgaggaaacaccaagccttattaattattatcgacctcttcgccttaaagctgtggtcgctgcgacgtcgataaagggcgctggaccggaagacaagcttccaacaaatggacaaaatgttaacggggcaccggacggctatctggatattcctttctccgactgaaattacttgatctgaaaatcagtgcgcgggacccgcctatcggtcgagcacctgcggcggaccataggcaatctcagtcagggccgtttatcgcgattacgaggagtggtgccgtatcgaggagcgccgctcatgaggtggaggaatggcgagcatcgacacttttcaccggcgaccgcattcgccggagggtggcgtttctgcgatcgaagaagctgggggcgtggcgcccccttctgagcaaaggggagccgaatgggacatctaaaacttgttcacaacaccgctgcattgacaaggatactctcggcagcagggctttttggcacgttagtcgacaatgttctgtcgcgttacaatatacgaacgaaggtgcttctgttcgtccttcccttgatcataagtatatcggcagtcggctttacaggcctttatgcctccggccttcttcagggccgaatggaaatatccaacggcattttgcaatcgctgagtggcttcaagaatctctatgcgtccatggacgatttcctgcggagccccagcgacgcggcgcgcgacaagctcttggctgatattggctctcagaaggatatcctcgcagcgacacttactcagatcgggccgagctctgaaggccatgacgatttggctgaggcgacgagcaagacatttggcgtctcggctattgtcggcaaactttgggcgttgcatcagcaggaaggagatcttcgcgctgcactgaaaagcgagcaaagcgccttaatcggcgctcgcttcaacgtgagctccgtgtcgcagcagctgcaggactccacgggagatagcacggcagaggcgacggccaatctgcccatccttggaagcacccgccgcctggaaggttcgatttactctatgcaattggtcctggccgaattcacatcgggtaccgacaaggacaatctgattcggctgcgcagatcgcgaagcttggcataaatatcgatacgttagagcagagcgcaaaagggagagagctggccggggatgtagtcgcgcccataaggcctatgatcgcttcaatgcagtcgaatggcgctaagctggtgggtgggcaccattgaaaaaggcctgcctccggtgggaatctcaacgtaagaccctttccgaaattgctctccttgagggcaaaagcctgatcgacatcgagctctgccttgagcgtgcgcttgtatcgcttgatgcaaaatcgttagaagaagcaattgagaaggcggagcttcaaaagcgggttgaataaggattgcgccttgagcgctccaggcctaacagcgcgccgagaactttcgtttctggctgcttcaccgttgcgaatattcaccggtgtcaccttcgatcggttcgaccatcgttcgcacgccgcctactatcagtcccataaatccgctgatcacatgtcaggtggattgggtcctttcaagccggtttcttcgacacaaatggccgggctcccaggcaaaaaaacggtgatttatcggcttaagcccgaacgaactaacgaggtcgaattcccgatgtttgcttcagactccacggtcgcaatttgcaaaggtcccacgatgcatatcattcaacaatcagacctttgagaccgccgaagcggcctgccgcttcgctcgcgcttcccgtctgccttcaatcttatcgattgccggcagtagcgttcgttggcaccacctttcatccagcctcgtgtcctccgcgaaatgtttgagtatgtcgaagacgtcggtccctgtgacagagtgagcgttgcgcccaaactggtggctcctcaggtagcaaaacagatctgaaaggcaatggatcgcttctttgtgatcgtgtcttgtagtgcatgaccgatataggtccgaacaacccgccacctggcattcatctgacggattgcgatctcgtcgcgtctttgtgttgccggggcataatgttcccgatgcggcttttcaggcacagcacagggtgcatcacggccatttctatggtcgagcgtgttcatttcgaagcatgatggtggttacgccgtcccgaaattcctcgcgtttgacacctatgatgtcatggaggaagtccacgataattggacggccgtttacattcgcttcgacaatcgcagtgcttggcgaattcatattgtctttatccggatgcatcgaaaaactcgggaagctgctcgatctgggcgtcgtgaaagtctgctgacaaaacgagaaactatgttgggcttctgatggtctcgttcgattggcggtgtccgcgtcgaacgcgttcgaacggctcaatcccaacggcaaggatggtggagaatggctaggccttggccgaaaaactaaagcggtcgcgagggcacgtttcatgggaagctcgccacatcgcgttcaaccgtcgcttcgacaccctaggccgtgtggactcttggggttcccaccgttgagcaaatcagattcaagactgtcttttgaaggcagtcatgggagtttcggatcgtcttgtccttcgggatgaacagtgggagcggctatcagcccacgtcattggcgatgagcgcacgcgcggttcgtcccggccgcgacaaccgcatgttcttggacttggaagccgtgctttggattgtgcgtaccggctcgcccaggcgagacctgccagaggtgttcggcgaatggaacagcgtcttccgccgtttcagccgttggagccataacggcatctggtggcgcatattcacggcgatgtcggtcgatcggactacgaatacctgaatgtcgattccagcatcatccgagcccatccgcacgccgccggcgcaaaaaaggacctgaagatcaggcccttggccgttttcgcgggggaactgagcaccgaaatacatacggctgtgcgtggtctcggatgcccggtccgctgcgcgcttacagcaggccagaagggtgatgcgccacaagccgatgccctgattgagggcctgctgccgacatcgtcatggccgatacatagtgaccgcctgcgcaaagccatcgcggacaaaggcactgtgtcggtgatccccaacaatccttcgcgcgcccaaaaatatccgctggacaaacacctctacgcccagcgatcatctgatcgaatgctgtttctcagagctcaaacagttccgaagggtagccacacgcttcgagaaaaaccgccagaaactaccgcgccatcatcacaatcgcagctatcgtggatcaggtaagtgtccacacgacctaggtgcatccctgcacggcgacacaagcagcaccatgcatccaccggttgccaaacatcagatggtggcgggcagccggtcgagaaacttatccagcgtgatcgggtactgacgtacccgcacgccggttgcgttgtagaccgcattcgcgactgccggcgcgacacctgtcagcccgagttcaccgacgcctttcgctttaacgggagagatagcaggatcaacttcatctatgaatacggcgtccagatggggaatatccgcgtggatgggcacctcgtaaccggcaagatcatggttgacgaagaagccaaaccgtttgtcgaccgccatctcctccatcaaagcagctccaatgcccatcgtcatcccgccgatcacctggctgcgcgctgtctttggattcagaattcgaccggcggcacacacggcgagcatgcggcggacccggatttcaccggtgaaggcgttgacgccgacctcgacgaaatgcgaaccaaaagtctgaatcgcaaactgctttgaaagatccccgaactccatactgtcctcgacgacgatgtcgccatcggcggaagcggaggcaatcggcacgcttcgatcgcctgaacgaacctcgccggcgatgaactcggtattcgcggcgttgaacccgagacgctgggcgacctcctccctcagtttcatgcaggcggcaaagacgcccgctgtgaccgaaggggctccctgctgccctccggagccgggggtctcgggaaagatcgaatctccaagctttgctacgaccctatgaatgggcacacccatcatttcagctgctgtctgttgcacgatcgtgtagctgcctgtgccgagatcggtcatgtctgtctctactgtcacgacgccgtggcgatcaagacgcacacgagctccggccttggaaatcggcgctccgcggatagcgcccgccatacccattccgacgagccaatggccatcgcggactttacctgtctgcaccttgcgtgcgctccaaccgaagcgttcagcgccggtacgcagacattcgacaaagggacgggaggagaaagggcggtccgcgttttccgggtcgacctgcgtatcgttcaggatgcggaactcgaccggatccataccaagcttctcggccatctcgtccatggcgatttcgagcgccatcagaccaggtgcttccccgggcgcgcgcatggcgttgccctcggcaaggtcgagcgtcgcaagccggacacgggtcatgcggttcgggccagcgtagagtgcgcgcgtcgaaagggtcgttggctcggttcgcccaccagcaagattgccggaccaactctcgtgtccgaccgccgtcagttttccgtcgcgcgatgccccaagccggatccgctggatggtcttcggccgatggatcgtcgtgttaaacatgagcgaacgctggagcgcgatcttgaccgggcgccgaaccattctcgcggccacggccgctagcaccaggtcaatctggaccgtacccttgccaccaaaaccgccaccgatgaaggacgagatcagccggacgttttcgcggggaatgccgaggataagcccgagatcgcgggtaccccaattcatctgctggatcgaggtccagcacgtcacccggtctccctcccaagtcgcgatcgtggcgtgcggttccatcattgcatgcgcctggtctggaacggtgtacgtctcgtcgaccttaatatccgcattggcgaaggcttggtcgaagtctccgacctgcgtctcggttggaccgccaaatggctgctgctgcgcaaccggagcgctgtccagctgcgcctcgagatcgaattgcccttcggtgcgcacatagtcgacgcggatcagcgaggatgccgcgcgcgcctgctcgaaggtctcggcaatgaccacggcgacaggctggtggtagtgatcgacgtcgggcgcggcgagcatgcgctgaacgtaaaaattgccgacaccaagcgggccggcattgcgataggtaacaacggcaagcacacccggtgcggcctcggcccggcgcgtgtcgatcgacgtgatccggcccttggcgatgccagccccgagaatgtaaccataggcaacgttcggcgcgacgtcgtgatactcataggcgtaggtcgctgtaccggtcgtcttgagcctcgcttcaaaccgatcaaccggttggccgactatacgaagttggtcgatcgggttctgtcccgcaggtgtctcgaatttcatcggtcagcctttcgcttgcgccatgacgtaggcgagcgttcgctccaccaaaggcactttgaatgcgttgtcgtgtgtgggctgcgccccgttcatcaatgcgtcggcgactgccccggcaccacgcgggagtgccgcctcggcaccctcgacccgccacggctttggagcgataccgccgatcgctacccgcccgctgccatcctcgtgaatcaccgcagcgaccgagaccagtgcaaaagcataggaggccctgtcacgaaccttctggtagaaatgacgtccgccgatcggcggcggcagcgttacggcggtgatcagttcgccgggctcaagtgccgtctcgacgtgcggcgtagcgccgggcaggcgatggaaatcggcaataggtatcgccctcgtctggccatccaggcgaaccgtttcaaccaaagcgtccaacgcccgcaacgcaacagccatgtcgccagggttggtcgcgatgcagtcggcgctcccgccgatgacggccagctgtcggctgactccggcaatcgcggcacagcctgaaccgggcacccgcttgttgcaggcctggttggtgtcgtagaaataggggcaacgggtgcgctggagcaggttaccgccggtagtggccttgttgcgcaactgcccggaggcgcccgcaacgatcgcacgggccagaacgccgtagtcacgccgcaccctcggatcggaggccagccgggtgttggtcaccgccgtgccgatccttaacccgccttcggcggtttcctcgatacggtcaaggccgaggtcctgaaggtcgaccagatggcttggcgtttcgatctcgagtttcatgagatcaagaagattagtgcctcccgctatgaactttgctcctttccgccgcgccacgatcctggcggcatctaccgtgctcgtcgctctctcgtaggtgaactccctcatgccgggctcctcgcgacttccgccatggcctcggcaatgttggaataagcgccgcaccgacagatattgccgctcatccgttcgcgcatctccacattggtggtttcgggcgaagccgtcaggtcacccgtcatatggctgggaataccagccttgatctcgttgagaacggcgacggctgaacagatctggccgggcgtacagtatccgcactgatagccgtcatgcttgataaaagctgcctgcatcggatgcaaattatccggagtgccaagcccttcgatcgtcgttatgctgtcgccgtcatgcatgaccgcaaggctgagacatgaattaatcctcacgccgttcaccagaaccgtgcatgcgccgcattgtccgtgatcgcaccccttcttggtcccggatagatgaagatgttcccgcaacgaatccagtaacgtcgtacgtggatcgagctccaatttgcgatccttaccgttcacccgcagggtcagcggcaatttgcgcacatcagtcacgcttctgatcgtctccgcctgagcagcgccagcaaccaccggaagggccacggtcaccgctgacagaagcacatcgcgccttgttaactggaggtttcgttgatctttcatcggccgtcctctcaaagggttttggaaacctcgatcttttatgcgccgggcaaatctcgccgttgctttgcatggttcatgtctggagatagggggcagagacgcgatgattagtgcgtcaaactcgatagagtttatgaggcctgagaataaaagaagttgccgcgaatccatgtgctgcgcgagacgcaagcatattcccgccgatcgtcggcaaaaatcctgaagcgtgcgggcagacggaacctgatttttgaccgcctttatcgtgactcgaccgggcgtgatggggggcagcccatccaatcccgcgtgatcttacccaagcgaaagccccggagagcgtcttaagtccatagcgatcaggcgaaaaagtgcggcgagaattccggcgccgcctcacgatcagaaagctgtcagccaatgacgagcgacctgcgctgggtcaaccagacgatcatcgccaaggcgatcaggaccccgccgcccgtgacgacagcgacccagctgccgcgttcccacaaaacgcctgccatcatcgaccccaccgcaccgccgatgaagttacaggcgacgaaggccgtgttcaggcggctgcgggcgccagggtcgacggcgaaaagtctcgattgattgagaacgtttgtcgcctggatcgcgacatccaggagcaggaccgcgacaagaactggaatgatatgcgttgaaccaaagcccgcgatcacgagagagaccagcgccagagcaagcgcggcgcccgtaccttcgaccgaccagccccgatcatggagcaagccggctcggcgggctgcaagcgcgcccgcaagaccgacaaggccgaccagaccgatcccgctgactgaatagccgaaaggcggcgaactgagaaggaacgtcagtccggtccagaatagcgtgaagacggcaaatgcgcaggaaccgatgaccagcgtaatttgtacgagacgatgttgacgcacgaccgaaaagaccgaggtcaacaatttgccataggaaacggcaggcctcggcttctccgccgggagagcccgcaagagaaggatcgcaagcagaatgatgaacagggccgccgcaacgtagattgcccgccaaccgagggcatcggcgagaaagccgctgatcgtgcgtgacaacaggataccggtgatcagtcccgagacgattgttccgaccacccggccgcgctggtcgggctcggcaagatcaccggcgagaggcgtgagaagttgtccagcgaccgtcgtcaacccgacggctgcaagcgcgacgagcagagcggcaaagctcggtgcaagcgcgcacgcgataagcgccactgcagaacagatcatgatggccgggatcaagcgccgcctgttcatcgtatcgccgagcgggacgacgagcagaatgccgagcgcataaccgatctgtgtgactgtaatcagtgtgccggcggcggcgatcgagacaccgagcgatccggcgatatccgacagcaagggctgggcccaatagagattgccgaccgccgcgccaccggaaatcgcaaacaacagcgtaagcgcgggcgacattgcggtggacgctggagtttcagagtacgcgcgcgacatggttcgttccttgaacagaaatcgaggtgcgccgaccttgctggctcacctcgtgtttttctcagcaattttcgttattgacctgcaatcaggaccgggtctcagcttgcgggaccttcgacaatatagacgcgcgacgtcgccgatttgtgccggatcggtttgagtttttcatattcgggcgagctgtaccaagcctttgccttgtccatgctgtcaaaagcgatcacgaccatccgcccgtcgaaacccgagccttcgagagaagcgatgtttccgccaccccggacaatgaaacgccccccgaatggcttgaatgtggattccacctgggcgctgtatggcttgatcccctccggatcagtcacctggaactccgagatgtagtaggcaggcttcacaccgggagccggctcctgggcgctggacgctgacaacgtggaaaaggtggcggcgccaagtccaaccaagagtgttgcgacacgagctttcttcatctttggttccttcgtttcaagagaggtgaatcgacgttgtcctggcttcaccgctgcttcgcgctgagctggaaattgtccgtttcgaacagcttccgatcgaggatcatgtccttggtggtggcgacctaggtcttgaagtgcgcagagtcccggtgagcctcgtaagcagcgttgtccgcatacatttcgaagaagcgaaggtggttcggtttatccttgatcgaaacggcatagagcgccagcacccctggctccacccggatcgacgtcgccatctcgactttgacggcggccgaataggcttccatctgcgccggatcgatttccaggtcggcgatgcggaccacgggactgttcgcgtcctgagccttcgccgaatgacccgccaaagttaggatgaccaccgtagacacaacgaaaagctgcttgatttccatggaacgctcctcagttggtcacgaccggtttgcaaacacatccttgaccactggcatggctgagaacacacatggccagccgctgtagaaggcaagctgggtcagggcttcggacgcctgttcctgcgtcaggccgttatccatcgcgcggccgagatggtaggtgatctgtgcgacctgaccattcgcgataagggctgcgacagtgacaaggctgcgatcccgcggcgccaggccggggcggagccaaaggtttttgaacaggacctctgcggtatagtgcacgacaccggcggatacatcgccgaaattagcctgaacgccagtcgcgcgctttgcttccgcctcctcgttcaaaggaagaagctgcggtgacgcaccgggcaactgatcggcgccgatgccacgttcaacaaagatatccttgacgatctcgacagcgaagaaggcattggaccatccagcgtagaaggcgagatgcgtcacgatctcggagacttccgcagccgagacgccactgtcgagtgctttgttgacataatgcggcaaaccgatcgtctggttacgcgcgatgagtgctgcaacggtcacgatgctgcgatctctcgcagacagtccagcgcggctccagagatcgccgatgaccgtgttttcggtataggcggccaaggccggcgaaacgctgcgaatctcgtcaagtgtcagtgcgggatggtcattggttagttttgccatgatgttgatccagtcggttcacgagtttaggggtgtcactttgatcgttgctgcgcgggcgcgcgcactgatcatcgggttgaggtaacggctcttggcgtatttcgcgcggtaggcatcgtcgatacggtcgttgattggcccttcgacaggcgcgaattcgacgtctttggtcatgccagcgaccgacacgcggccggccttctgtgtgactgctgactggtaccagcgcgatgcctgcccgtgatatcctcgtacatagagggcaccatcgacaaccaccgaccaaatccatgtcggcgtgccgtaggtactgccgtcttcgcgaaacggggaaatgtggagatcgtccgatacggcgaccttgccgagctcctgatctgaccaagccatgagaaatgccttccatcgatttcggggtatcccgtcagcaaatactccagggatcgccacgagcgtgatcgatgcatggaatatagtatctagttttatttcgattaggcgctaatatctcattgaacttatatcggagatcaatgaatgcggcgggaagatcttggcgacctgatggccttcctcaccgtggccgaggaacagagtttcacgaaagcggctgctcgtctgggaacatcgcaatcctccctcagcctgatcattcggaggctggaggaaaggctcgggcttcgtctcctgacacggacaacccgcagcctcgccccgacgccggcaggggagcaacttctttcgaccctgggacccgccttggggaatatcgatgcgcaactctcggcgctgaccgagtttcgcgacaaacctgcgggcaacttccgcatcaccgccgggcaacatgccatcgacactgtgatctggccgaagctatcgaaattcctttgggactatcccgatataaaggtcgagctcgtggcagaatccgccctgacggatatcgtcgcggaacgcttcgacgccggcgtcaggctcggcgatcaggtcgaaaaggatatgatcgcggtagctgtaggaccgatggcccggatgattacagtggcggcgcccacctgtttcgaccagctggctcccccctcgacaccgcacgagctgacggcccaccgttgcatcaatcttcgtctgccgagctatggtggcttttacgcgtgggaatttgaaaaggatggtcaagagctgcgggttcgtgtggacggacaggtcgcgttcaacgccgttccccagaccgtgatcggagccttggatggctatggtatcgcgtatcttcacgaggacgcggttcgtgagcatttggacagcggccggctcgtccagatactggcggactggactccaccgtttgcggggtaccatctgtactatccgtcgcgacgccatccatccccggcattttccatgctggtcgatgctctcaggcatcatccggcagcgtgactggttcgggcttatgaagtgggggagggatggcgcctagctcaaatttgccgatcagcgtttgagatgcgcatggcgtgcatcttgaactccaacggcagggacgatgggtcattggcgggttcgtggttcacggcgaacatcggtggacgagatgttggcgctgtgccccgaatgttgagcacgggccagatgagacgcggctatcataaggggcttcaaggggaagaggggaccgagttcgaagcgctgcctacagtcagagcctcccaattctggtgcgcaaacttcagtttttcgccgtcgtcgagagagggcccttcgacgaacagccgggcgtcgtttcctggacgatattggtagggatagtcagtggagaacaagatccgatcgacgccgaccgcatcaacggcctggcgcagataggcctcattatacatgccgcttggggtcagatagaggttgttgcgcacgtagtgaatgaagggatgcttcaatcccgacacgcgatcgagcatcactaggcgctcgagataaaagatgacaagctcgccccagtggccaaggatcacctgtaggttgggatgccggtcgaagacgccggccagaacgatgcgaacgaactgcatgccggcttcataatgccaaccaagtccgaacgtcgaaagcgcgaggtcgaccggcgcgccgaagcctgagtaataggcttcgcgaacactcgattgagggatttgggggtgaatgagcagcgggacaccgagttcggcggcgacggcaaatgtcggcccgaagatcggatgatccatgcttttttctccgacccggccatacagaatggctcctttacacccgaggtgctctacgcctcgctgcaattccctcgcagcggcatcagcgtcggcggatggcagcacagacagtgcctggaagcgggatggatgggtcgcgacgacctcggcgagcatgtcgttcgtacgacgcgcgagatcgacgccgtgatcaccgagattgctgagaccgggcgtcgtaagcgacagcacctgcacatcgaccccggtctcatccatgagcgccagccgcttttcgccgatatcggcaaggcgttcttcgatcacgccacggttcagcgctaaggttccgtcatcggcgccaggggtcgtgttccaggcgtttttcacatcatttggcagcacatgctcttctatggcgataatcttcatagtcggctccaattgctttcgacgccattttgccaggcgcgcgacgttcgggcggcgatgagcgagcagtgccgcccctactatatgagaactcggccgatcagcttgcggctgtgagcttatcgacgattgccttgccgacgccatgcgccgatgctggattttggcccgtgatcaggcgaccatcggtgacgacattctccgaccagttcggcgccggctgatgtagcgcgccgcggtcattgagggttgatgccagcagatagggcacaaccttgtcgtatttaacctccgcctcttctgcatcggtgaaggcagcaagcttcttgctggccacgagatagctgccgtctgacagtttcgcgttcaccaaggccgccgggccgtggcaaaccgcggaaacgattccgccggcttcccatatttcgcggatgaccgtttgcacggccgcgtcgtctgcgaaatcccacattgtgccatgacccccggcgaagaacaccgccgaataccgcgctggatcgaggtccgcgagaaccagcgagtgggcaagcgcgtcgcgaaacgccttatccttccagaagcggtcgttgaccggatcggaaaggtcgaagaagtcgatcggcggatgtccgccgcgaatggaggcgatctccaccgggatgcccgcagcctcgaacacttcgagcggatgggtgagctccaccattgcaaaaccggtcggctcgccggtgtcgccgcggatcgggtggctggtgaccacgcaaaggatgggcttgatgttatctgccattgacttctatcctcatgatttgagcgaggccaggtcgatgacgaagcgatatttgacgtcgctcttcaacatgcgctcataggcttcgttgatctgttggatggggataatctcgacgtcggaaacgatgccgtgctgaccacaaaaatccagcatttgctgggtctccggcacgccgccgatgaacgacccggagatcgcacgacgaccttgcacgacggaacccgccctgaccggagtagccaagggccccatataacccacgaggacaagcacaccctcgagcgcaagggtggtcatgtaaggattgacgtcgtgatcgtagggaacggtatcgatgatgatgtcgaaccgccctgtcaccgccttcatctgctcggggtctcccgaaagcacgacatgatcggctccgagactgaaagcgtcttcttccttgccggcggaacgggtgaacaacgtgacgtccgcgccgagcgccttggcaagcttcaacgccatgtggccgagaccgccgagaccgatcaccgcgaccttgctgctcgctcccactttccagcgatgaagcggagaccatgtcgtaatgccggcgcacagaagcggcgcggcgcccgccggatccagcccctccggcagctgtaatacgaacttgtcacgcacggtgatggaacccgagtagccgccaaaggtgatgctgccgtctcgccagtcgatgctgttgtaggtgaacgtcgcgccctcgacacagtcctgctcccagcccttcagacatggtttgcagtgctggcaggagtcgaccatgcagccgacgccgaccatgtccccggacttgaaacgggatacgtcggttccgacctcgcgcacccggccgacaatctcgtgaccaggaacaatcggaaaagtagtataaccgccgtggttcctggccaagtgcaggtcggtatggcagacaccgcaatagagaatatcgatggcgatctcgtccggttccggagcacgccgttcgaagacaaagcgctccagtggggcagtggccgattgggcggcaaagccaagtgcattcatggtggttctccgttcatgcctgttccgcaggcgtgattgcccaggtcacgccaaggcggcgtgacctgggctaagggcgcgagctggaatcagacgttgccgggtgcgaaaagggcttcccagttcgcaaacgggccgagcgggatgacttcccagtcaatgaggccggccttggcaagcggaaagtcggcaagcgatgccttggctgcctcaatggactcagcttccgcgatgatggccacgcctggacgatcctgtcggaaataaatgtcgcggatgacgccatccttgtacatcttccaggagtgccggacttcatccaacatgtgcggctggtatttctcaaggctggcgccgggctgcggaatatcaaggcaaagcagtttcatctcaaggatcctttcgtgcgttagcggattgcgtaggtgtcaatcgccgcgtgatctcggccacgcggcggcccagatagtgcgcggtccgtaggtcgcactctggcggcgccacatccggtgcctggtcaacgttggcgtgggtcatcaccccaagccagctcccaagtcgattgagggcgtccgggctcgatgtgctgctgttgtttcctggcatcaggtcgagaccgacccagatcatgccgtgctgggcggcgaacagcgccatggaaacaagcgagttcagcttgtctccatgctgcgcgccggaattggtgaagccggcgctgatcttgttgcgccatttgagctcagtccaggcggccttggtggactcctcgaagaactgcttgagccgggcgctgatcatcccattgtaagtcggtgagccgaagacgatcgcatcgctcttctcaagaacgtcccagtcaaccggcccatcggcgacggcgatcagctctgcctgaacattgtccacgtccctggcaccctcggcgaccgcctgggcaacacgcgccgtgtgtccatatccactgtcaaatacgatcgaaaccagcaattgtccgtccttttgatgatgaatgcccgcgctccgacgggatcaccgtatctcgggccgttgaaaactcgtttaccgatacggggttctatcgtagaattggggtcagcagtggcgatagtttttccgttatctgcttccccgcattctacatcagaggcagaaatggttggttcaaagtcggttcgcgacagatttgacggtatcgaagtgttcgtcgaagcggtcgaggcaggcggtttcgccaaggcagcggaccggctgtcgctgacacgctcggcggtcggcaagtcgatcgcgcgactggaggaacggctcggcgtccgcctgtttcaacggacgaccaaaatgcagtgcctcaccgaagacggtcagcaatattatgagcggtgtctgcgcgccattgacgaactgcgcgcaggagaagtgatgctggagaccggccgtcaggaagtcgccggtcggctcagggtgtcggcttcagtcctgttcgggcgctattgcgtcgcccccatcttgcgggcctatgctcgtcaacatccccgacttgaactcgaactgagtttcagcgatcgccaggtcgatctgatcgccgatggctttgatttggcgatacggaacggtgcgctgggtcattcgtcagccttacgaggacgccggttgggcagccaacgcaaagtcctgtgcgcgtcgccaagctacatcgcgacaaaaggcgaacctcgttcaatcaaggaccttaccaatcacgacctgctcgcctactggagaggcgatcacgggctggcttggcagttacccgaccaaaccggcacactcacagacgttgcggtaacaacgcggctgcgtttcgacgatctcgaggtgatcgcggacgccgccgtcgaaggcatggggctttgctggctgccttactggcttcttcgcgatcggatacggcagggtgagttggtagagctttgggcagatcgcccaagcgcatcaatggaattctacgctgtctggcctgcagcccagtacctgccgcttcgctccaggctggcgatcgatgtactcgcctccgaacttcccaaaagcgttgaaggctaggaccgcaggaattgaagatctggcagcctcgcgtatgacggcgcgaccgccgcgttcacctggtgggactttcttagggagcgggaaggcataaccccagaggtaggtcagcaccgccgtgcagcaaacgtcgcagcgaagacaacggcatacgacggccgatcatcgataggcataagcggcatatcaagaataggagatgcatctgggagacggcaaacacgacccaattgtacattcccgcaatgtctgataaaaaaatcgccgtcgaaagagtgctgaccggatggtagcccggtcgccgtcttaacggacggcaactcttccctccggggtatccgcgacacctggaccggcttgccggttgcaaaggtgtgtccgctgataaccccacgtcatcgtcggcgcaccttctcaattcgttagaaggaagtacgacgttgaatcttacagaaaacacaatactcatcactggcggcgcaacgggtatcggcttcgcgctcgcgaggctcttttccgagaagggcaatcaagtcatcatctgcggcagaagccaagcagcgctggagaaggcgaagacggaagtgcctgcgatggtgacgcgcatttgcgatgtagccgacacaaatagccggcgcgcgatggtcgaatggctgaaggccgaataccccaccctgaatgtggtcataaacaatgcaggtattcaggcgcggcgtgacttcaccgccgatccggagatcgctacgctcgaccaggaagttgcgatcaatctcacggcccccatccatctgatcgcagagctgctaccgacactgagacagcaggggcaggggttcatcgtcaacgtcagctctggtctggccttctcgccaatggctgatgttccggtctattgcgcgacaaaggccgcgatacattcctttacgctcagcctgcgtcaccagttgaaatcaactggcatccgggtggtggaagtcgcgccaccaattgtcgacaccggtctcggtggcaaggcccgcagtggagggacagccaatcagatgatggtgacccctgaagacttcgccaccgaggcgctcgaacagcttgccgaaggcagggacgaggtcctggtcggtgtttccgccaagacacgcgagctaggcgaagccatgttcgagcgcatgaacagccgcgcctaatgcattgcggattgccgtgattttcgtggcaatcctctcaagctctgcaaaagtatggtgccagaaactgtcacgtagatgtgcatagtggtttggaccagagcgagtttctccatcaagtttgccgggtttgccgcgatctcgacgcgaaggatgctggcgcaggtaggtcacgcggcggcaaggagagtgcgctagtcgcacgatcagaacttagcatcacaagtgtcggagcgcctacctaactccgaaaaaggaaaacatatgaaagccgttaaattcaacgagtatggtggcaccgatgtcctgcgggtcgttgaggtggaggcgccgcacgcgggccccggtcaggtgcgcatcgcggtgcgggccgcgggggttaatccgatcgactggaagctgcgggcaggatatgttcgcgacttcatgccacttacctttcccgccggcgttggttccgaagctgcaggcatcgtcgatgagatcggggatggcgtctcgggcgtcgccatcggtgatgccgttttcggttacgggcagaatacggtggccgaacaggcggtgttgagggcctgggcacgcataccggaaaacatgccgattgagatggccggtggcctagcggtcatcgttgagacggccacgcgcatcctcgatcacgttaaccttaaagccggtgagacgctgttgatagcaggtgccgctggcggggtaggaaccgccgccatccagttggcgcgccactgtggcgctcttgtaatcggtacggcgagcgagccgaagcatgattacatccgcgagttaggtgcgataccgacgacctacgaacctgggctggccgcaagggtacgcgaactggcgccgcagggcgtggacgcggcgctcgacctcgccggtgccggcgtcatcccggagctggtcgagattgtcggtgatcccgcgcgcgtcgtatccatttccgacgtcacggccccgcaacatggcgcgaccttctcgggccgatcggccgatcaccccgaagacgcctttgccgaggcagcgcggttgtatggcgaaggcgcatttcatctacgcatcgagcggactttcccgatcgagcaaatcgccctggcgcaggaggttagcgctgcggggagagtgaccggcaagctcgtcatcacagtgggctgagccgacctccggcccgcgtgatgattgcacctgcgggccggaaggctcagttttactggccgcttactggctaccgatcgcccgatacgacgggaaaaacgacagttgcaatgaaaaatcctcattttccaaggatctagaaccatgtctagcgtcgagccactcgacccgtcattcccgttaacccgccagatggaagtcgaagcggcccccatcgtgttggtcaatctctgcaccatggcgcccgaagacgaagcagcgttcttggtcgcctgggccgctgatgccgccttcatgaagagccagcccggctttatctcgacgcagctccaccgcgcgctaggagacagcccaacctacctcaactatgcggtctttgaatctgcagcgtcgtggcgcgcggccttcaggcaccccgattttcaggagacggcgaaggcgcatccggcgtcggcggtctttcgtcctcatctctttcagaaggtcgctgtgccgaacctgtgcaccgcatagcgggcaacgatttccgagttccgcgctcggagatacatgagcgctggggacaaagcgctcattgcccgcggcaacataataagcctgttgcggctttgatgtcaggcaagcctcgtccttgattagcacgaccgccgacgaattgcggcaaatccaaacgccatttcaagtgggctagccgcatcaacctgcgcttgcctaacatgcggccaagtcgaacgggcgttggtgaactcgggacttatctgtacttccttgcagccgaccatgctgttccggaactttgcgctgtcaagtgccgaagctgtggccgcttgattctgcgtttgctcatcctgaaagaatggtgacagaaactgtccccatgctggtttatgtacgtttgcgattgcggagaggcatcgaaccctctctcgtgcaatgccagaaaggatttgaaagtatgtccagacgtaaaccaatcgacgcttatccagtcgcttgccagaaggcggcgcgacctcgcctctttggcaaagcaaccgttttcgaatttgctcggcttgaggcactctgatgcaaagaattcaatatagcaggtatggcggcccggagttgatgcgggtcgaggatttcgagttgcccgcggtcggaaaaggtgaggttgccgtgcgggtcaagttcgcggcgatcaaccctatcgactggaagctccgcgctggccaaatgaagatcgtcaccggcagaacctttccccgcgccatgggaatggacttctcagggatagtcactgcgatcggctccgacgtcacgcggctcaagattggcgacgcggtgttcggtcttgccaagttcaaggaaagcggtgcattcggccatgccgtggtgacaaaagatacgttcctggctcgaaagccggataatgtttctttcgaggatgccgcatgccttggcacaccaggcgtcacggcctggaacgggcttatcgacaaggcaaagctgcggcctggccagcatgtgtttatcaacggctgcgccggtgctgtcggcgaagcagccgtgcagatcgcgcagctcttcggcgccactgtttcggggagttgcagcgcgcacgacatggaacgtgccagatcgcttggcgtaaagacggtctacgactatcgtaccaccgatctgtccaagattgttgatcgcttcgacgtcgtctacgatacggcggccacgctgacactttctgacggaatgcgtatgctgagcaaaggaggcgtattcctggatttgaaccctgggctcggcaagttcattcgcgcagcctttgatcgccggctaaagcccatcattggttctccccgggccgaagtcctggaaaaagttgccgaagcagcgggcgcaggcaaattcaaaatcccaattggagaaattgtttcactgagcagcgcgatcccactcattagcgagcttgagagaggccgcaagctaggcggcaagggcgtcatggcaatggagtagaaatggcaagaagtcatcgactgttcgacctgatgcaagtccttcgcagacatcgcgcgacggtgtcgggccatacacttgcgagcgaacttggcgtgtctctgcgcaccatacgcagagacgtcgccaccctgcaggacatgggcgcagacatcgatggtgaggcaggtgtcggctatatcttgcagcccggcttccttctcccaccgctgtcgtttacggacgaggaagtccaggcgctcgtgatcggtgcccagtgggttagtcgccagacggacgactcgttggccttcgccgtgaagaacgcgctggccaagatcaatgctgttcttccacctgacatgcgatccggtctcaacgaagatatgatctatgtcgggcatcccctgaaagggggcggcccgctggatctaagcgagatccgcaggtcactgcgagagcagcgcaaactgcgcatcacgctatctctgaaacatgtcaacctgggaaaggagatcatctggcctatcatgctggggttcatagaatcaaagcgttttatcgcggcctggtgtgagctggacgaaaagtttcgtgtaatcggattggaagatatcgaaactgcggaggtcctggtcgagcggtattcacgaaaccgccgccagctcgtaaaggaatggcgtgcacaagagatgaggccctgcaacagcgaaggcgaagtttgttgagcctaatttagcgccgacgtttcactaagctgagcagaggctctgctgcaaggtcgggaacggctatatttttcgtggtttgttcgcaattttgcagtgaacattccagccgttgatgcagacatgggcgaagtcgtaaaagcctattccacttccaaaattcaactaggacgaaggtgcatcatgaaactagttcttccattcctgcgcccgctctatgatgcgctggagccttacgcctaccctctggtacggataacagttgggcttctgctctttccccatggtgcccagaagctcttcggatggttcggcggagaccccgctcgggccattgactcattccactccattggttttgaaccggcggcgttgttcgtaacgataactggcgtcgtggaattttttggcggcttgcttgtcgccgttggtctcctcacgcgacccgcggccgcgatctgcacctgtctacttgcggtgacgatctgggttacgtcggcaagggggtgggcggctatggaatacagcgtcctttggacaattgtttgcctaacaatcggagttcgtggcgggggtaggatatccatcgatcgtttgatcggccgcgaattctaagagtccgttcaagaaagcaggtaacgagcaagccttctggtcatgagcttgatcattgcagtttgcatgaaggcgaggcttgtggccgagaaacgttcgaagtcctttgccattcggcggtttatgccgagccacgccagcgtccgctcgacgatccatcgcttcggcagcacttggaacccggcctgatggcgcttgacgatttccatcgggcgcggactggcctgttcgaccgttgggccctgatagccgccatcgccgcagattttctcgatgaatggaaagcggttggccaacttgtcgaaaacaagtgccgctccgtcgcggtcctgaattcctgctgagtggacttcggctttcaggagcatgcccaaggtatcgaccagaatgtgccgcttgcggccttttatctttttgcctgcgtcataaccgatatcgaaacgggcgtccgggccagtctccaccgactggctgtcgatgatcgcaaatgatggttgctcttcgcgtccctcaagctgccgcgttcggcaatagagtgcatcatggatacgtcgccaggttccgtcccggcagaaccgtttgaaataatgatagaccgtgctcttcggcggaaaatcatgaggtagcaatgcccactggcagcccgactgcaacagatagaaaatcgcgtccattaccgagcggagacaggtcttgcgcctgcggccaagacgaggctgccttggcatgaacggctccaccatactccattcgcggtcggtcaggtcgcttgcatagcgcatgcggcttctgtcatggtgacgccgggtgaagggtgtccaggccattcgatctctccgtatttgtcgcaaaatacaaagaatctgattgccgcccttcactcaaccccgcgctcgccagccattgttgaacagacactaaggcaatcgccggtatgagtacgcctagacaccggcaggcgattcaaaaattgacgcggcctatcttgatctatcggttcaacggcatttcaccgaacactagtgaacgtggcgacgatatcgaacgccgtttcgccaaagattgtctggatgtcaagaaacttggaaggcaggcgggcttggaagcgcgatggcacggcgtacgaagggccagtgcatcggcacgccgggtggccctgaacattgacgataagtctggctctgctgttccataatagaacttatgcgatacgttataacgtaacaaagtaagcttgatccgttcatggagtcatggatgctgtcaccgatggaaaggacctcccttcgctgggtgtctcgaggcaagaccctcgacgaaatcgcttttgcccgaaggaaagggcgttgccgatatcgagcattatctagcgcgtgcaattgtcgcgctgaaagcaagatccattgaggacgcgcttgtgaaggccgacatctctgcgtccgagtgatgcgaagattacaatggttcttcgtgaaagagcacttttgcggtgccttcggcattttccttgagatccacgccggtcagttgcaggcgcagtgcctcccggacgatccagacgattttgtccgcggccatctcgtaactcagcccgtcggcgtggatgttggagatacagttgcgctcactgtcacgccgtcccgcttgcggatggaatgtgatataggcaccaagactgtccggcacgctgagccctggccgctcgccgatcagaacgatcgccacctccgcaccgaacgccgccgcagcctcatcgccgaatgccaccctcgcctgttcccccaatatcaccggggcgaccctgaatcccccaaggcgcttcatgcatgccttgaagagcgggaccgcatggcgctcaaccgccgaagcggacagcccgtccgcaatgacgaacgcaatgtcgtggctattccccggacccggaagatcagccgcaagcggctgacgcccgagatccggacgcgacagatagacggtgcggtccgtggcgcaggacctgacccggatcgttgatgctggcgcaagctccttggcgagggcgacaaaatccactcgaccgtgcacggcgtccctagccctggcatgggcaagctgaaaatccaagattaccgtcgtcggcaacgcgtcgcctgccctgccaagtccaatccgggcacgtgtcgaattgcggaaccgctcaaaggggtcttgatcccaactcatgcggacaccccgtagctcaaaagattgcgagagaattggcccgaggcgctggcgggcgccagacggcccaaatggtcaagcatgcccatgcgctgaagccaagcctcgaattccggcgccggcggacgattgaactgatgcctaagaccgacaatatcgtgataggagaggctctggtagttgagcatgacgtcatctgcgccgggcacggcaatgagaaaattgacgcctgcgacggtgagcagcaccatcagattgtccatgtcgtcctgatctgcctccgcgtggttggtgtagcagacatcgacgcccatcggcacgccaagcagcttgccgcagaaatgatcctcgaggccggcgcgaatgatctgtttagcgtcgaacagatattccggtccgatgaaaccgacgacggtgttgacgagcagcgggcggagttcccgcgccacggcgtaagcccgtacctcgaccgtctgctcatcgacgccatgatgtgcgtctgccgaaagggcgcttccctgaccggtctccagatacatcacattggttccgacggtgccgcgcttcatcgacagcgcggcctcattgccttctctgagaacggcaagatcgacgccgaatcctttgttcgcagcctcggtgccggcaatcgactggaaaactaggtcgagcggcgcaccagcctcgatcgccttgatagatgtggtgacgtgggtcaacacgcaggactgggtggggatctcgaaccgttcgcgcagccggtcgaacaggacgatcaatctggtgcaggcatcgagattgtcggtggccggattgatgccgatcacggcatccccgatcccgtagagcagcccgtcgagcgtcgaaccggccacaccttccggatcgtcggtcggatgattgggctgaaggcggctcgaaagcctgcccggcagcccgatggtggagcggaaagctgtagtgacactgcatttgccggcaacagtaatcaggtcgtgattacgcatgatcttggaaaccgccgcgaccatttccggcgtgaggcctggtgcaagtgccgccagcctttcggtcgtcgcgtcgtaggaaagaagccaattgcgaaactcgccgaccgtcatatgcgaaaccggcgcgaatgctgccgggtcgtggcgatcgatgatcagccggctgacctcgtcggtctcataggggatcaacagatcctccaagaaggttttgagcgacatgtcggcgagcagacagcgggcagccacccgccgctcattgcttgaagccgcaataccggcaagcacatcgcccgacttgagtggcgaggcacaggccatgaccgatttcagatcctcaaaaacatggcgctcacgcccaagaatgatcgaatacatttttctccgctcgtgggtatcaggcagtccatttttgcgcgagggcgcagctaccttcggaaatgtaagtgctgaccgagtttggccagtacggttgccatggctcccgaaagctatgcacgaaccatgccactcttctgcaggcggtacgcgatacctttcatcgaagatttgcggatcccaacggagcaatacggatccgccaagcatcatgacggcggtcggaactcgtatcgctcgacgcggcttcagccgaccgttagcccggtcttcactgtcgacgaagctctttcgatcagcgtggagagataggcagcgacagaagcttggtgatccgcggtcgccaagaggtcgtttcgaacctctatcatgacattcggaataccgttcgcgatgccgtgctcgatgagcgtgtgtgtgaccccatcagctggaccgtacggctggttgcgcatgacgacaaatttgtgatcgttttcttcagtcccggagaggattgcgtccgcgagcctggtgtcgctgtcgtgcaatattccgatctcgacctcgcgctttctgccgaaatagacgggggtaaaactgtggacggtaacgagcatcgtctcgcggccctgggctttgcgagaggcgagaatttcggagattccatcacgaaagggcaggtaaatttcattgacccgcgccacacgctcggcctgcgagatgtcctgatttcccggaacgtcataaatctcgcttgtccctacaatcgcggacgctgcctccggcgggcgattgcagtcgtaaacgagccgcgaatagcgctggtaacagagaagcgcatcgagggatgacgaaagatatcgcgagactcccagcgctcctggatcccaggcaatgtgactttcaagcgccgaagtatcaagaccaaggcagcccagcgctgccgggatcagacgcgaggcatgctcgcaaacgatgacaatgtcgccgcgtgctgcgtcgttttcgatcgcgagcgatgacgccccagggcgcaaaagcgagaattcgggcatctcaaatctccgttgatatccacacaatatcaacgaaagcaataaaagcaacacaaacccacatttggtcgatgccgctcagattgccggccgaaactgcttcgacctggcctttcgcgctttccataaaaaatggtggaattgccaaaatcgtaggcaaaatgccccaaaccagcgcctttttatgaggcagtggatatttctcgttattaggtcccttctatatcctagcgcttttgtgggtggcagcgttcgatcgcgcgacgaagttttggtgccgaaattttgaaaatctcacaacaccgtgttgacaaatgcaacatatccacataaatccacatcccaaggagatcgagatcgtggatttttcagttcttacattaagcgcagcaattgcttccggtgagctctcctctgaggctctcgtcacggaatgcctggcgcgcatcgcacggctaaatccgactatcaacgccttcagccaggtttatgaagaaagcgcgctagaagaagcccgggcctgcgaccgtgaggctgcgcaaggccacttccgcgggccgcttcatggcattcccatgggcgtcaaggatctcttcttcgtggatggcctgctgtgccagcgtggctccaacgcttacaagaatttcgctcccaaggcgacggcgccgatcgtccagcggatgattgacgccggatctatcattatcggcaagacgaccaccaccgaaatggggtggtccggttcgggcttttccgaattctatggtccgacacgcaatccctggaatcctgacctcactagtggtggttcgagctctggttccggtgcggcgcttgcggcacggatggttcccttcaccctggggtccgacggcggcggctctgtgcgcatccctgctgcattctgcggtgtgttcgccatgaaggggtcgctggggcgggttccggcgtggccatggagcgcgactgagatgttgtcgcatgccggcccaatgagcctttcggcaaaggatagtgctttcttgttcaacattgccaaaggccccgatccgcgggaccatcaggccctgccggacgacgaagccgactacacgcagacgcgatcgatgaagcctctgcggattggctttgctccaagtctctttggattcagggttgcgccggagatcgatcgggtcgtccgtgaagcggtcgatacccttacgcaggcgctcgccatcgatgttcgtccggtttcccccgactgggaagacccgatccgaatattcgagaccctttgggttgccgggcgaggtgtcgcctatggctcccagtccgatctatccgatttcggcagtggttttcgtgctctcgtcgaggcgtcggccagctataatctcaacgactacctttcggctgccaaagcacgcgccgaatttgcgggtcacgtgcacgcattcttcgaagatatcgacttgttgctcctgccaaccgtcccggtggagccctttgcggccgaccgcgaggcgcccgaaggcttccaatcaccttcggaagtcctcgcttggaccggttggacaccgtttacatatcccttcaatctgtcgggcaatccggcggcttcacttccttgtggcctgactgtcaatgggctgccggttggcctgcaagtcgtcggccgccgtcatgctgatgcgcttgtcatggcattttgccagcaagccgaaacctacctttccaataataaaaatcctccgcttgttgttgctggcgacacggcggggtggggaacacccagcaaacaacctgtggagaagtcgttatggagttcaatagaagagcattcttgagaaattctgcgcttgccggtgctgcactcggcatgcctgtcctcaatccgtcatttttggtaaattcggccttcgccgccgaaggaaaggtactgaacttcctttcggcggaaaatcttacgggaaactgggacccctcctcccacacgacgctcgctcagatcaaccttgagagcttcgtgttcgggtatttgacacgggcgcccatggggccggacaagcccgatgagcttgtcatggaactggcgaccgacatgaagctcatcgatgagcacacgttggaattcaagttgcgcgaaggcgtaacattccatgatggcaagcccttcaaggctgaagacgtcaaggcgaccttcgaatatgcaagccagaccgaccgcccggccgcgtggtatcccggcccgtgcgaggttgagatcgtcagcgactatgtcgcgcgcgtaaaaaccgataaggccggctatcctgccagcctgttctggttcctctcggcattcctgccgattatgtcggcaaaggatgttgccgatccgaagacgctttccgcgcggccgaatggaactggttccttcaagttcgctcgccaggacggcaacacgacggttctggaagcgttcgatgccttctatctcggcaagccgaaaatccccggcatcaatttcagcttcgttggcgatgcgacgacgcggaccctcgcgctcctgaacggtgaggccgatctcatcgaacgtctcgaagcagagcaggtggacaccatcgaaaaaaccggcggattcagcatccacaaggctgtctcggtcgagaacaagtatctctggttccgttgctcgaagccgcctttcaacgatgtccgcttgcggcaagctgccgctcatgcaatcgatcgctcggtgatcgtcgatatcatgggtgtctcgggccacgcatcgaatgcctggatttctccggtgaagttcggttacgtcgacacgccgaactatccgaaattcgatccggatgaatgccagcgactgctcgccgaagccggcttcccaaaaggtcagggcctgccggagcttgaatatatcacttcggtcggtttctatccgaagacgaaggaatatggcgaagtcatcgccgcaatgctccaggaacagggcttccccgtgaagcttaatgtcatggaagttgccgcatggaacgaccgcctttacgatcgaccgggtggcggccccggccacatgatcgactgcggctggtcgacgggctcgccggaaccggatctcgtgctgcgcacgcatttccattcgagttcgaagcgaatttgcggtatcgaggacaaggatctcgacgcggtcctcgacaaggagcgcaacacgctcgacccagcggcacggaaggcggtgatccagaatgaggtcatgcccacgctcgccgaaaaggtgccgtcgctgtcgctattcacgtcggtcttcattcatgcaatgcgtgatggattgaaggatatgtacttctatccgaacgggatgatggacgcgagcaaagcgattttgtcctgatagaatagccgcggccgctacacggtggcggccgctccccctagcgatcggggaaaggtagatacatgtttatcctgtcgttcttgttgagacggctcctgcaggggagcctgatcatccttctcgttaccttcatcatcttcaccctgttgcgggtggttcccggtgatccggcccggcttattgtcggcggtatggcgccagacgcggtggtcgcgcaaaaggcaaaggaactcggtctcgaccgtcccataccattgcagttcgtatcctatctcggcgtgcttgccaccggagacctcggcacatcgttcgtcaggccgaagagcggtcaaagccttgggggatcggcctttgacgacgcgacccgcgaggatcgagcaaaggtgcttgacctcgttctcggtaccctgccgatgacccttcagctcggatcgctagcattggcaattgcgttgctggtggccgttccgcttggcaccgccggggggctctatccgggccgttggccggacaagttggccctggcggtcggctcgatctgcgtgtcgactccaaacttctggctcggcatcgtccttacgcttttcctctccgtgaagctgcgtctgcttccggccatcggctatcacgggttcagctacacgatcctgccggcgatcgtgctggcggtggaaatcgtccccttcatcctgcgcacgctcacggtttcggtggctcaggtgatgcgtgaggacttcatccagctggcgccgatccgagggctcacccgcagtcgcacgatcttttcgcacgcgctaggcaattcggtgatcccgctcatcaacctgctcggagtgcaactcggcatgctgctcggcggcgtgctcgttatcgaattcatctttgactacccaggtctcggccttctcacgatcaatgccgtcctgcaacgcgacttcccgctgatccagggcatcgcgatcttcatttccgtgatgttcgtgatgatcaacgtccttgtcgacctgatcgcgatgaccatcgatccgagactggagtattgacgtgaccgatatcgttcagcaaagcgccgcaccgcgcgccgtaaccaagcgtggcgtcacccccacccgacggatattgcagatcgccgccgcacgcgcggatttccgcatcggtctcattggctttggtcttctcatcgggcttgcgattttcctgcccttggtgagttcgatcgatccgatcaagattgcctatacgtccaaactgctgccgcccttcccggcagacggatggcaatggccccatttgcttggtacggatcaactgggccgcgacgtattgatgcgctgtctcgtgggcctgcgctactcactgttcatcggtgtcaccacggtgatcctgatgttcgtcgtcggatgcagcctcggactttatgccggcttccgcggcggctgggtggattccgtcatcatgcgcctgacggacgcgcagctctcgatcccgatgatcattcttgccatcaccattctcggggtgtcccgcccgacggttcctgcgatcattctcgtgctcggcctctccggctggccgctctatgcccgcgttgcccggtcggtagcactcggcgagcgcaatcgcggctacgttctcggcgaacgggtgctcggcgcgtcggaccttcgcatcatgctgctcttcgtggcgccggtcgtactgcccccgatggcttttgtcgcggtgctggatatagcccgcatgatgatctttgaatccatccttggctttctcggccttggcgttcagccgccgacgccaaccttcggcaacgtgatcgccgacgcgcggaagtatctgatcaattcgtggtggatcgcaacgatgcccggcctgtttatgcttgtctcgctcacttgcctcaacctagtaggatcggcacttgagcgagctcgcaacgcagttctgagaggagaggcatgatgaccagtcctattctcaccgtctctgatctaagcgtggacctcatccgtgagggcagcaaaaggcgtatcgtggacaacgtcaatttctcgctgcagcctggcgaggtactcggcctcgttggagaggcgggttccggaaaatcagtccttgcccgcgccctggtgcatgcaatcggttcgcctctggaaattgcctcaggcaaggtaatcttcgaagggagagacgttctctcgcttgatgcccgcggtctcagatccgttcggggcaaccgtatcggttttatcggtgccaaccccatgggttcgctcgaccctcgtctgccgatcggccaccaaatcatcgagaaactacgctgtgttcggcccggcatcggacgggctgaggcgcgggagaaggttctagacctgctcggccgcgtgcgtatcccctcgccaaagtcccggtttcatgaggcgccatttcagttttccggcggcatgatgcagcgcgtgatgatcgtcgatgcgctggtctcggatccgtctctggtcatcgccgacaatatcacccagccgctcgatgtcacggtcgccgcgcaaatcatccggctcatcgacgatctcagacagagtatgaacacggcgtttctgttcatctcttcgtcgcttccggtcgtggcacagattgccgagcagacgctcgtcatgcaacggggctgcatcgtagaacgtggcagaaccgaggaaattgcctcgaacccacagcagtcctacacgcgtgcgctgctttctcgtattccgtcgatttggaatgatgtaacgggtccggcggacaaagaaggcgaagccgtgctcacggtcgataatgcaacgcgcacctacagtgtacgacagcgcggctccttcaacagcttcaaccaggtgaaggcggtgcgcgacgtctcattcaccgtgaaggccggggagaactttggcatcgtcggcgaaagcggctgcggcaagtcgacgctgacgcgccttctcgcctggctcgaacagccgaacgttggacgcatcgcttttcttggaaaagaccttgcaggcctctccgcccgttcattgacggaaatgcgaaaatcgttccagttgctcttgcaggatccttatggttctctgccggcggggatgcctgtccagcgcatgattgaagaaccactcctgatacacggtgccaaccggcgtgacgcagcgcgccgcgcacaggaggccatggccgaagtgggtctcgatgccgagctggctcaacgcttgccgatcgggcttagcgccggtcaacgtcagcgcatcaacatcgcccgggcgctggtgctggaaccgcgactgctgatcctcgacgaaaccctgtcggccttggatcaggtcgagcaggcagagcttctggacctcttcaccaggctccaggcgaagcacggattttcctatgtgttcatctcgcacgatctcgcgctcgttcggcgcatgtgccaccgtatcgctgtgatgtatctcgggcgcattgtggaactcgcggataacgagaccctcttcgagcatccgcaccacccgtatacacgggcactcctcagtgcgatgccgacattggaagataatcgctttccccgttctgagtatctcctggacggtgaaccgccgagccctatcgatcttccggtcggctgctcattccgttcgcgctgcccgcgcgcgcaagacgactgcgaaaagatcgatccgccgctgcgagcgttggggggagccaaccacgccgcatgtctccaccgacatgacgaggagaggagtgtgtatgtccagtgaggtccgcaaggaagttatcctcgagcgtcttggtcgtgatcagcgtgtgagcgttctcgatctatcgacggagttcggcgtttccggcgaaacgatccggcgcgacctgaaggatctcgaagcggagggtgccgtacggcgggtgcacggcggtgccattcccgcagggcgcaccgccgataccccaatcactgagcgcatcaaattcaactcgttcgcgaaggatgaggtggcgggtcttgcgcgtacgctcatcaatgacgattgcgtcatcttcctcgacacgggtacgacgacgctcgcactcgcgcgaaagctgagcggcttcaagaaactgagactctacaccaattcgctgatgatcgcgcaagcggcctgccagcaattcggcgtgaaggtgcaggtgacgccagggaacctgcgcccgatcgaacaggacctcgtcggttacgacacactttcctacatccaacagttccactttgacatggtcttcatgggcgtggcggcggtcaacgcagattacggcttcatggatttcgaggaagacgaggcccgaatccgccaggcgctcctgaggcagtcgtcacgcagcgtcatgctagcggatcactccaaattcgggagggtcggcaatgtcatcaccgctcctttcaagcagataggcacgctcgtgactgaccgtcgtccgccggaggatattgtcgccgcggttcggacggaagagctggagatcgtccatggataatgcagggacgataccgcgaactgatttcgacgcgatcttcgaccgcatttctgccatcggggctcagcacggcgaaggcgtgacccgtctggcagcaagcgccgaggacggcatggcgcgaggcgttttcgccgtgtggatggagcaagcgggcgtgcacgtcgcgcatgatgcaatcggcaaccagtttgcctgcttcgattgggtcggtcaggatgccccctggatttttgcgggttcgcatctcgacacccagccgcgtggcggccgtttcgacgggaccctcggtgtgttgaccgctggacaggccgcgctggatattcatgcagaggttcaacgcggacgtttcaaaccgcgctataacctcgcggtcgtcaactggacaaatgaggaaggcgctcggtatcaaccgagcctcaccggcagcgccgtctattccggctcactgacgctcgatgatgcacttgacctgcgcgacggtgacggcatgtccctaaaggccgcgctcgcggcgatcggcatcaacggggagaccgggacggttcccccctcgcccgcggcctatgtcgagctgcatgtcgagcaaggacggaaacttctcgaagcgggccggcgcatcggtgtcgttgaaggaacctgggcagcacgcaaaacgaccgtccgctggatcggccgggcggcgcataccggcccgaccccgatggccgatcgccgggacgcgcttctcgcagcagcacagggcattgccgccttcgaggccgtcgtcgcggccaactttccccacctccatcggtcggccgcgcgcctcgtcgtcgaacccaactcaccgaatgtcgtcgtcgaccgggcgaccgtctggttcgagctcagaggtcccgacgtcggggaactggacgcagccggtgcgctcgccctagcggccgtcgaaaaggcggcagccgatacgggcacgcagctggaaatcgtcgccgatacactgagggaccccgccagcatggatggccggctgatggcacttgtcggccgggcggcacgctcttgcggtttcgagccgctgaccatgcgttcggtcgcgggccacgatgcggtcgcgttgcaaaatagcggcattccgtctgccctgatcttcattccgagcgtcgatggcattgcccatcatcctgacgagctgaccgagccggacgatgtgcaggctggtctgacggtgctcaccgccacgcttcgccacctcgtccagggagagttctatgcaggatgatgttgcggttcaggcagcgctcgaagcggtcggtctttccggtgcgacactctcagcaccgatcggcggcgtcgtctcgcccattcaccgcgctgtcgaaaacctctgctttttcgcgaccaaggcgggccgacctccggtctttgtcaaatgtcgtcacgatgacatgtcccagttcatcgcgccggaccgggtggccgacgccagccgcaaggcaggcgagcttggcatttccccgcgtttgttacatgccgatcgcagcgatggcatcctggtgttcgaggtgcttggcgaggaatgggcctgggggcacaccgatgtccttcgccgcccgactgttctcgaaaaccttctgacggcaaaacgcacctttcataaggctccggcgcttgccgaaacgcgcagcgttttcgatctcgttgcagcctaccggcaccttgccgaaggatccgaagtgagtttgccagcaccggtggtcacggtctcggctgccgtccagcgcattgccggcgccattggcgcctcgggtgtcgatacggttccgtgccatgcagacggcgtctcgtcgaacgtcatggtcgggcccaacgacggagttcggctagtcgatttcgagtggtcgcgccaggcggaccccgcgtatgatctcggaatcgtgctggccgaactcctcccctttgatggcgatgcgctgctggcgatcgagatcgcaaacggaaagcctgatgcgggcgtgcttgcgcgggcccgtctctacggcgcggccgacgacctcatgtgggcgctttggggcttcatcaacgccgcccactcgccgcgcaagcatgttgaattcttcaaatatgccgaatggcggctcctgagggcccgcacggtcatcgaaggcccccgcttcgagacatggcttaaacaggtctgaggaggtagcgatgagacgcagactaggcgaagggacatcgcaggcagaacgggcaatcgagcacgccatcaccgctgtggcggagtggcagggccttgaaatttcttacgaacccgtgcctggcggcatcagcaatcccaactggcgggtctacgtcgtcggtgcgccgcacagctttttcgtgaagatcccaggtgccggaaccgaaatgttcatcgaccgaaggaccgcgaacgaggccgggcgcaaggcgcattccgcaggcgtcggcgcgcgcattatcgacttcttccctgacaccggggtcgaggtcagcgaattcgtcgaggggcttagaacctcgaccaacgccgactttctcgatccggtcgtgcgtttcaatgggcttcgcgccttgaaagccttcaacgacagttcgctgctttcacagcgaaagaccaccttcgacatgatcgacgaacatttccagcaggtcctggaactgggtggtcaatttcccagcgacttcggttggttgaatgctcgctatcgcgaggctcgcagtgcgctcgaggcgtcaggtctcgatcttgcgccctgcatgaacgatacgctggcaggcaacttccttctccacgcggaccgccgcgtgatgcttgtcgatttcgaatatgcgtcgacaaatgatcgggcggccgaactcgcgctttggttctgtgaaatgtgcttctcgcccgaggtcgagaaggagctgatcgaggaatactacggtcgggcggatccgggcattttggcgcggatctcgctgttcaaggcgcttgtcgacctcaagtggtcgacctgggcaatggttcagaatgaagtatcaagcctcgatttcgactttttcaaatatggattctggaaacatatgcgcgcgcgtttcgtgatgagcaatcctcaatggccgcaatggctcaaggcggtctgacacatgcagaacactgaaggcgtgatctcccccgattttcttcgccgcctggcggcggttgccgcgcgcgaagcattgccgcggtttcgattgccgggcgccgtcgtcaacaagatcgagggcgggttcgatccggtgaccgaagccgaccgggaaacggagaaggcacttcgagagctcattcgtagcgaatatcccgaccacggcatcctgggtgaagagttcggcaatgaaggcgcggatgctggcctggtctgggtcatcgacccgatcgatggaacacggtcgttcatctccggcattcctctctggggcaccctcgttggccttacaaaagatggtgacgcagtagccggtatgatggcacagccgtttatcggtgaattgttctatgcgaccggcaacggcgccttttatgaggggccgcacgggcaggcgcagctctcgaccagtgccaccaaggatctctccgaggcgacgctgttcacgacgacgcccgccatcttcgaggccgcccgcagagcacggtacgaccagcttgagaaaatggtccgcttggcgcgctatggaacggattgctatgcctattgcatgcttgcggcaggccagatcgactgcgtcgtggaagctggcctctatccctacgacattgttgccctgatccccattatcgaacaggccggtggtgttgtaaccgactgggaaggtgggcctgccgagaagggcggcggcatcgtcgctgctgcgaatgccgcccttcacactcaaatcatgggcgttctacacgcgaagtgacaggtcgttttattgctgctgggagaagtcgtggcgtgacactgacaatcagaggcaacatcccgtcactgaggtctgctaaacgccactctccaccataaacctggacataaatggcagacttgcggcgccgactgcctttggagcgctcagaatactagtaggcatgaccgcgacctcgggaaccaatttctgtagtgagacgcatacgttcctagagacactggccggcacaaaggaagatacgatgaccgcttccaactcgacgaactgggtcagcgacttcacgatgtcgtgcattttttccgcgagtctgccttcccagtcgaaaaccaagccgttctcgggccatggcgcaagcggttgccaaagatgatcggtcggcgcacccgcagcggtcaacatggactcgagcgatgccacgccgacgtcaaaactgaccaccgaattgccgtgatgaatctggtgctttaacaccagccggctgtggaggtttgcgccaatgtaaaaatagagatagtcggaaaacggcttggcaatgccaaacatgctctcgccgccagccgcagcggtaatgtcgttctgcacgaagaccgaatatccagtaagttcctcgacttccttctgcaaagaatcgaaatagtctttttcctcgcgccccgcggaagcactggacggcagcgctaggccaataccggccagacgcttttgtgcatttttcggaacgatgttcaccgcctgacgaatagtatcaatgaacatcgtctggttgctgtcgcgctcaggctgcgggttgggcagctgcatatgatatcgaatggcaccaacgaaatcgatcagaacaacgtctgtccgcttgatgccaacgctgataccaaccgagaaagctccctccggattgagggctacgggaacggtgggaggccccacacgccccttttgcgcctctcctttttgaaccaacccttcttgttccagcgatcttacgagcaccgaaatcgtctgggcggagagacctgtccgttcgccaacctccagtctcgttatctcgctgttctgaaggagtagcgacaacagcaggcgctcgttgtagctgcgcacgctgaccgcattcaggccggttgcccgatcggcgatacgtaagggattcggtggtgcaaaacgcatatcaggcatcaatgcaatcctcgcggagtaaggcatgaagatgaactggcatccaattgtagtctcgcagcggcaatatcatcatctccaaccaatcgcctcgacttcccttgcaagtgctgttcccaacgctgcatgcgcgtccctattgatgtggaaaccatcgcaaggatcacacgccgcgacggtggcggcgtcaaagaaatggacttcaagtgaatcggcaatgatttcgaattcaagggcgagacgccgggatttctcctgagcgccggaaaaaataggttcccattccttgatatcgtccagcattggcggtggcgcaaccaccatgatttcgggggggtggccacccgggccgggagccagttccctgatgtcgtaaaccaggcagccgatccccatcgcgacttccgatggcggttgattgaaacgaaccttcaggtcgttcgtccccagcatgatgatcacaaggtcgaggatcgcgtggctcatgaggcacggacgcagataagttcggccgttcttcagcgttccctcgatggggtcgtcgcgaaccgtcgtgcggccacttaggccctcctcgatgacataccactgagttccgagttcccgtctcaaaacaccgggccagcgctcgtctggcccgtatcgttccagcggcgagccgcccggaatctggccatgggtattcgagtcgccgtaacataagactgaccgcatttcctccccacctttatggcaaatcataaagacgcatgaacattctcgggtgactatggcctttgtcgatctatggcgcaagtttattgatattcattcagtctgaataattattgacagcgatttagaggtgtggcatttctatgaatgggagagcaagattttccagtaattgaataccgccaccctcagtcatccaatggggagctggtacgatagtgatccgcttcggcgggtgctggataaatgcgtctccgtggcaatggagatccgacgtcgatcgatgacgacggcatttggagcaagggaggaattatcagtgaacggctatctgaaatctattctcggggctacgcttgtggtggcatccaccgcgggcccgctttgggcagacgacgtcaagttcatggacggcatcacgccgcgagctggcgacaatccgcagaccgaagcaggcaagttcaaaaaagattgcggctgggtcatcggcatgagcgattttggcgtcaacgccaatacctggacggtccaggtcgcgcatgaatccgaggcggcagcagcagccaacaaatgcatcaagaaattcatcctcctcgatgccgggttcgaccagaagaagcaggtcgccgatatcgaagacctgatcgcgcagaaagtcgacgcgatcatcgttcagccggtcacctccacctccgcaaactcatccatgaagaaggcgattgctgcaggcattccggtcatcgttcatactggccgcgtcgatacggatgactacacgacagaaatccagggcggcgccgagcacttcggcaaggtgatgggcgactggctcgtcaagtctgtcggaaacgacggcaagatctgggtgctgcgcggtctcgccggtcaccccgaagacaccaaccggtataatggccttctggagtcgctcaagggcacgaacgtgaagatcgtcgccgaagagcacggcgattggcagtatgacaagggcaagagcgtctgcgagaccctttacctgaacaaccctgatgtaaacggcatctggtcatctggtgccgacatgacgcgcgcctgcgttgacgtcttcaagcagttcggcgcgaagatcccgccgatttcgggcgaaggaaacaacggcttcttcggccagtggatcaacgacaagttcgagtcgatctcggcggaatactcgccggcgcagggtgccgagggcgtgcatgccgctattgctctgctcgagggcaagcagctctacaagcactacgactacaatcctccgggctgggatctcgagaaggttaagaagtattatcgcgacgatctctccgcgaacgtctggtggccttctcagctctccgaagacgacctgaagaagtattatagcaagtaatcatcctcccgtggcgcttgcgccggtttcgttccggaaccggcgcaagccaccggaacggaattgcgtggattgggaggaacgaatggccaatcttgtagaaatgtcaaacatttcaaagtcgtttggcggaagtctggcacttgatagggtgtcgctggagctcttgccgggttccgtgcatgccctgatgggcgagaatggcgccggcaaatcgacactcatgaagatccttgcgggggttcaccggccagacagtggcgatatcttcaagaacggccacaagatctccttcatcaatccgaaagaggcgcttgatttcggcatatcgaccgtcttccaggaaatgacgctcctgtcgaacctcacgatcgccgagaacatgtttctcggtcgtgagccggtaacgcgcttcggcactgtcgattacaagcgcatgaatgccgaaaccagcaaggcattgaacgagctttcgctcgaccttaatccacggacgttggtttctaatctcagcatcgctgaacggcaatttgtcgaaatcgcccatggcatcaaggccgatgcctcgattttcattctcgatgagccgacggccgctctcaacgccgccgatgtcgagatcatgaacaagcatatccgccgattgcgcgatgcgggcaaggcgatcgtctatatctcgcaccggatggatgaaatcttccaaatctgcgacacggtcacggttctgaaagacggcaagctggtgggtacgcgcccgctttccgaaatgacgccgacatcgctcatcgcaatgatggtcggtcgggaattgaaagatcttttcccggcaagacacgcggcggcagccggcgagccgatgctcgacataaagcacttcaagatcggcgcgtcgacgaagccattctcgcttcatgtttccaagggtgagatcgtcgctctggcagggctggaaggacaagggcagcagaaactcatgcgctcgctcgtcggccagttccagccgttttccggcaccgtcacattccagggaaaatctcttgccttgcccgtgccgaatgagaacggcatccgcaagttacagcagatgggcgtaggcttcgttcctgaagatcgcaaggaagagggtctgttcctgaaccttccgatcgcccacaatatcgagattgccttgcatgcggcacggatgggtttttcccccgcgaagaattatcggaaagtcgtttccgacacgatcaagcggctgaacgtgcggacgatcaacgcgtctgcgcccgtgggcgccctctctggcggcaatcagcagaaagttctgctcggccgctatatcgccgccaatctcgacatcctcctcattgaagagccgacgcgcggcgtcgatatcggcgccaagtcggaaatctacaagctgcttcgcgacttcacgcagaacggcggggctgttctggtcctgtcgagggaaaccgtggagctcatcggtctctgcgatcgcatctatgtcgtccatggcgacacggttgttgccgagatgcccgccgccaaggccaccgagcacgatatcctcgacgccgccttgagcgcgtgaacgccaaatcagagagtcaatgcgatgaataagacccttacaagattgtttacgggaggccagagccgccaaggtctctggatcgttcctctgctgatcacgatcatcctcagtatcgccctgatcgttcagacggaccagttcctcaacagtgaaaatctgttcaacctggtcgcacaggcaatgccgctcatcatcacggcggtgggtcagctgtttgtcatcctcgtcggcggtctcgacctatccgtgggatcgctgatcagtttcacgacagccatcctcgcgttggacgccccgggctacatcttgataccagcggtcttcctgctggcggcgctgctcggcctgacgaacggctatgtgatcacccgtctcaacgtgcatccgatcatcgcgacgctggcaatgcagtatattgtgctcggagctgcgcgcattttgcgtcccgtctccggcgggactattccggatgtcgttatcagctcggtctccggctccttcctggggattccgatgccgatattctggggcatctgtgttgccttggtcgcctggaaattgctttacggatcacggttcggacttcatctcttcgcgatcggtggcggtatttccagcggcgtagaagacgcgacccgcaacttcggtgttgccgacaagcgcaatgtcattctggcctatgtagcctgctcttgctttgcagctcttgccggcgtgttcctggcgggccgcatcgtttccggcgatccgaatgtcggtcttctcttcgagctcgacgcgatcacggccgtggcgattggcggcacgcaattgtccggcggcgtcggcagcctccagggaacgattatcggagccctggtgttggcgctcctctccaacggcatgaatctggtcaacgtttcgccgttcatccaaacggcgatcaagggcggcatcctgctccttgttgtcggtttccagacacgcaagaagatggggctctaagatgtcagccatcgcgaacaatcctgcaattcagcgaatgctcaaggttgcgccttcgtattacgtctttgcattgctcctgatcgtcttgtcggtatcgcgcccgcagatgctcaatgcaaacgtcatgggcatcttcattcgccaggtggcgcccctcggcgtcctcgtccttgggcagttgcttgtcatgcgcgtcaaaagcatcgacctggcgggcggcggtatcatcctgctcgtcaactacatcatttcgtccaatcttcttcccggaatgtcggcgacaggtttcgtactgctggcgctgtttacgggcacggcaatcggcctgttcaacggtttcatggtgggcaagcggcgtgtttctgcggtcatcgtgacccttgccgtgagcatcattcttgtcggagccgtccaattcctgtcgagcggcaagccgccgggcaacgtgccgacctacttcaacaccatctacaatgtgaagtttggcccgctaccgctcccggtcctgttctgggtcttgctgaccgcactgttgtccctgcttctgtcgagaacggtgttcggccggtatgtgacctccgtgggtgcaaatgcggatgccgcgcacttctcgggggtccccgtcgagcgcactgttgtggtcgcgcatgcgctcgcaggcctgatcgccggcattgcagcactggttcaaacggcttcgatcgcagtcggaagcgttcgcgtaggtctggatctgcccatcctttccgttgcagcgaccattctcggcggcgtggtcttcggccgaggagaaggtggcgtctgggggccgttcttcggcgtcctttcattcacgctcctctttgtcgtgatgacgtccttcggtgtgagcgactcggggaagctcattgcccaaggtctcatcattctgcttgcggccattttctacggcctcaaggcgcgcaactagttgttatcggaggagtaaggatatggcagagagccgctcaatattgtgttttggggattcactaacatggggttggattccggtaccggagtcgtcgccgacgctcagatatccctttgagcagcgctggaccggcgcaatggccgcggtactgggtgacggctattcgatcatcgaggaaggcttaagcgcccgcacgacgagcgttgaggaccccaacgatcctcgcctgaacggcagcgcctatctgcctatggcgctcgccagtcacctgccgctcgatcttgtgatcatcctgctcggcaccaacgacaccaagtcgtattttcgccgcacgccctatgaaatcgccaacggcatgggcaagcttgcaggacaggtgctcacctgcgccggcggtgttggcaccccctaccctgccccgaagcttctgatcgtttcaccgccgcctttggctccaatgcctgacccctggtttgaagggatgttcggtggcggttacgaaaagtcggtcgaacttgcaaagcactacaaggcgcttgccaactttttgaaggtcgatttcctcgacgctggcgagttcgtcaagaccgatggctgcgatggaattcatttctccgccgagacgaacatcacgctcggccgtgcaatcgcgggcaaggtcaacgcaatcttctcacaagaggcgaagaacgctgccgcttagcagccttccgccgccggccgccagcgtctccctcccaggccgctggcggtcccctttcgtcaacaagatttgaggcttccatgaccggctatattctggcgatcgaccaggggacaacgtcctctcgtgccatcgtgtacggccccgatgcccagccgatcgcgatcgaccaaaaagagatatcacagtcctttccgaagtcgggctgggtcgaacacaacgccatcgaaatctgggagtctgtgcttgagacctcccgcaatgctctaaagcgggcacgcatcgaagcgcgtgacgttgctgcaatcggcataacaaaccaacgcgaaacatgccttgtttgggaccggtcgacgggtaagccaatccatcccgcgatcgtctggcaagaccggcggacctacggggcctgcgagatcctccgcgcagatgggtttggcccgctgatacaggaaaaaaccggccttttgttggacccctatttttccgccacaaagatcgcctggattctcgacaatgtcgacggtgcccggcgtgcggccgaggccggacagttgctgtgcggcacgatcgacacctatctgacatggatgctcacaggcggcgccgtgcatgcaacggacgccaccaacgcgtcacgcaccgccttgttcgacatccgcgagaaccgctgggatgacgaactcctgggcgcgttcagagtgccactggctctgttgccggaggtcaaggactgcgcggatgattttggtcaaacgatcgtcgcccatttcggcgctcaaattccgatccgggcgctcgcgggcgaccagcaggcagccttgatcggccaagcctgcctgaagcccggaatgctcaaatcgacctatggcacgggctgctttgtggtcctcaataccggcgatcagatcgtccggtcgtccaaccgcctgctctcgaccatcgggtaccgtctcaatggcaaaacgacctacgcacttgagggctcgatctttatggcaggcgccgccgttcaatggttgcgagactccctgaaactcatcaaggaagccgatgagacgggccgtcttgcgcatctggctgatgaacaggaagacgtttatctggtgccggccttcaccgggctcggtgcgccacactggaattcgcaagcccgtggcgcgatttttggcctgacaagaggaacaggaatcgccgagctttcgcgggcgacgctggaatccgtctgctaccagacgcgcgatttgctcgaggcgatggcctgcgattatccgatggaggtcaggggcgcgacccttcgcgtcgatggcggcctgtcgggaagcgattgggccatgcaggctttggccgactgcctcggcagcgacatcgagcgatcacaaaatcaggaagccaccgcctacggagttgcggcactcgcgggctcgcaggccggcgtttggcccgaccttcaaacctttgccgcgaactggaaggcgaaaagcaggttcacccccaacctcaacactgacgaacgggcacgacgctatcggaaatggcgcgctgccgttgcaagcacgctttcctatgcggcatcggcctgacgtcacgggagatcgatatggaagataagatccacgacctgttcgtgattggcggcggtatcaacggatgcgggatcgcgcgtgatgcggttggtcgcggctattccgtggcgctggcggagatgaacgacttcgcttccggcacctcttcaggcgcaaccaagctcatccatgggggcttgcgttacctcgaacactacgagttcaggcttgtccgggaatcgctgatggagcgtgaagtgttgtgggcgatggcgccgcacatcatctggccgatgcgcttcgtgctgccctatcaaaagggcggcatccgcccggcctggctgatccggcttgggctctttctctacgatcatctcggcggccgtaagctcttgccgccgacggcggtgctcgacatgcgccgagacgaagcggcaaagcccctgaaggcactcttcaccaaggccttcgaatattccgacggctgggtcgacgatgcccggctcgtggtgctgaacgcccgcgatgctgctgataaaggcgcgctgatcatgccgcgcacaaaggttgtctcggcgagacgcgagaatgggctctggacgatcgagacggtggatacggtctccggaatcgcgacggttcaccgcgcgcgcatgctcatcaatgcagccggtccctgggtcgatcatgtgatccgtggagctttcggcaagaacgaggctcgcaatgtccgccttgtccagggcagccatatcgtggtgaagaagaagttcgagggaccgcgggcctatttcttccagaaccccgacaaccgcatcattttcgccattccctatgaggacgagttcaccctgatcggtaccaccgaccgcgactacaccggcgatccaaaggatgtcaggatctcagaggaggaaacggactatctctgcaaggcggcgagcgaatatttcaaggaaccggtcaagcaagaggatatcatctggacctatgcagggatacgcccgctcttcaatgacggcgcctccaaggcgcaagaggcgacgcgtgactatgtggtcaagctcgagggggctgacggcaaggacgccaacacggcgccgcttcttaatgtcttcggcggtaagctcaccacctatcggcgtctggccgaacatgccctggagaagatcggcggggcgatcggcaccaagggtgccccctggacggccaagagccatctgccgggcggagactttccggttcaaggctacgaggcggaggtcacaaagctccagacccgctaccccttccttgccacttcgtacgcgcgccggcttgtccgccgctacggcacaaaggcatccgaccttctcgggactgcgcagaagattgaggatctcggccggcatttcggggcggacctctatgaagccgaagtgctctatctcatgcagtatgaatgggcacgcacgacgaacgacattctctggagacgctcgaagaaggggctccatcttagccacagcgaagtgtcccttcttgagaatttcatttctgaattcgtccagcggcaggttgccgcgcagtgagatttttttggcgggccatagcgcatcgatcctgtcggccggccgcctgacgtttgaggagttttgatgtcggaaaagatttatccggtcaccaagccggtggagagccatgcgctgatcgacaaggccgagtaccaggagtggtacgaggagagtgtcgcgagcccagagcaattctggggaaagcacggcaagcgcatcgactggttcaagccctacaccagcgtaaaggacacgtcctttaccggcgacgtcgcgatcaaatggttcgaggacggggagaccaatgtctcctacaactgcatcgatcggcacctgcagacgaggggcgatcaggtcgccatcatctgggagggcgatgatccctctgtcgacaagaagatatcctataacgaactcttcgagcaggtctgccgcacttccaacgtcttgaaaaagcacggtgtcaagaagggcgatcgcgtcaccatctacatgccgatggtgccggaagcggcctatgcgatgctggcctgcgcccgtatcggcgcgatccattccgtcgtctttggcggcttttcacccgaggcgctgggtggccgcatcgtcgactgtgaatcgaccttcgtgatcacttgcgacgaggggttgcgcggcggcaagccggttccgttaaaagccaacgtcgataaggcgatcgacatcgccgcgcgcggccatgtcatggtcaagaacgtcctggtgatccgccgcaccggtacggcagtcggctgggcgccgggtcgcgacctctggcatcacgaggaagcagcatctgtttcggctgactgcccacccgagccgatgagggccgaggatcccctcttcatcctctatacttcgggctcgaccggcaaacccaagggcgttctgcacacgactggcggctatctcgtctacgcctcgatgacgcatgaatatgtgttcgattaccaggacggcgacatttattggtgcacggccgatgtgggttgggtcaccggccactcctatatcgtctacggaccgcttgcgaattgcgcgacgacgctgatgttcgagggtatcccgaccttcccggatgccggccgtttctgggatgtcatcgacaagcataaggtcaacatcttctataccgcgcccaccgcaatccgctcgctgatgggcgccggcgacgatttcgtcaagcgctccagccgttcgagcctgcggctcctcggctcggtcggcgagcccatcaaccccgaagcctgggaatggtactatcacacggtcggcgacgggcgctgcccgatcgtcgacacttggtggcagacggaaaccggcggcatcatgatcacgccgctgccgggcgcgaccgacctgaagcccggttccgccacccggcccttcttcggcatcaagccggagcttgtggatgcggaaggcaaacttatcgaaggtgccgctgacggcaatctctgcatcgccgacagctggccgggtcaggcacgttcggtctatggcgaccacgagcgcttcatccagacctacttctccaccttcgagggcaagtattttactggcgacggctgtcgccgtgatgccgacggctattattggatcaccggtcgcgttgatgacgttctcaacgtctctggccaccggctcgggacggcggaagtcgaatccgccctggtttcgcatcacctcgtctccgaggccgccgttgtcggctatccccacaatatcaagggccagggcatctattgctatgtcacgctgatggcgggcagcgaagggtccgaagagttgcgccagcagctggtcaaacacgtccgcgcggaaatcggcccgatcgcttcgccagacaagattcagttcgcgccgggcctgccgaagacccgctcgggaaagatcatgcgccgcatcctgcgcaagatcgccgaggacgatttcggttcactgggcgacacttcgacgcttgccgatccggccgtcgtcgatgatctgatcatcaaccggcagaacagggccgaggcagcctgagacccaaggaaaggacttatccatgagattgatactgatgggcccgcccgggtccggcaaagggacccaagccacgcgcatctgcgagaagctcggcatcccgcatctgtcgacgggcgacatcctccgggccgaggtaaaggcgggaacgcctctcggttcggcggtcgcggctatcatggcagccggcggactcgtttccgacgataccgtctcggcgatcgttgccaaccggattgccggtccggaggctgagcggggctttgtgctcgacgggttcccgcgcacgatctcgcaggcagccgcgttggaacaagcgctcggcgagcaagcgttgacggccgttgtcgaactcgtcgtccccgaggaggcgctctttgagcgcatccgccggcgggccgacgaagccgtcggtgcggggggaccgcagcgcgccgacgataatgccgcgacattggaattgcgtctgagggcgtatcgggcagaaaccctctcggtcagcgaattctacaaggatcaggcgccgtactttcaggtcgatggtcttgcctctcccgaggatgtgaccgcgcggatcttggagatcctgaagacggccgagatggaatattcctgaaacattactaattcaaaatcaattttacctaatattcattcactcagaataattattattggacctcgttatcttgggtggagaatcatgggtattcattttgacttcctgctactgcgcggaccgatccggacaaagatattttgccttctgacgccgatacttctcggcatcgcgggtctgagctttgtgaattatgtgtccggcaacatgttgaacacccagctggcgagcagttcgagcggaatgatcacgctgtctgcgatcaagcaggctcaggacggaatgaactccttcctgctcgaggcgacggaggcaaagcgcgatgcgctgaagtcactgctcgacgaccagtccgccaagatatcgacgagcttgtccttcgctcaagagcaggatgaacgacagagcctgcttgccgccggaacgattgccgaagaggtctcgcagacgatcgacggcctttgggaaatgcacagcgacgaaaggaaacttcgggacgggatttccagcgatctcgcaaccttgtcggatgtgcagtccaaactgcaaacctatctgaacatccccgctgaccaagcggcagcacaagcggcgacggcggaaacgctgaacaagatcaattccatgaactatgaacttcggatcgcctcctccgattttctgggtggaatgaatgaagacaccctcaagaaggtaaaaggtcgcctcaaagggctgggcttctatctcggcaaggtgaaagaacagcacgcggccaacggtcccatccaggaactgtccgataaggctgttgcggtgattggtcaggcgcaggaggcattcgatcagctcctcgtcaaggtcggggctcgtgacgcggcattcaaggcggcgagcgccaggatgaacgactcttggaacaagatcctcgagttcgcccagatccagcgtgatcatgcctccgccgcacaggatcgggcgcaacacatatccgccgtgacgaccgtgattgccctgcttttcggctgcatcgctgctttcctgctgctgcgaaccatcaagtctccgatcgaagcactgactgcatcgatgaaggcggtcgcgtccggcaaactcgacgaaaagatcggcagcgtcgaaaagcgcgacgagatcggcgaaatggcgagggcattggacgtattccgtaacaatgcgctcgaaaaaatccgcgtcgaaagtgacgcggaacagtcgaggtcgctggtgcggcaacaacgccaggaagacgatctgcgcaagacccgcgatgcggctgccatcagcagcgcggtcgaggcggttgcgtccggcttgcacaaacttgcgagcggagacctcacggtgactatcgctctccctctcgacggagagctagaccagcttcgacaggatttcaatggctcgatgttgcacctgcaggcgaccatgcgccagatccgcgataatgtcgaaatgatccagggcaacggcaaccagatggccgaggcggctgaggatcttgccaaacgtaccgaacagcaggctgcttcgctcgaagaaacggccgccgccatcgacgagattaccgtcacggttcgctcgtcggcggagcgtgccaaggatgccgaccagatcgtccgccgggccaagcgcagcgccgacgactcggcgatcgtcgtcaacaatgcgatcgacgcgatgggccgcatcgaagacgcctcccgtcagatcgaacagattaccggtgtcatcgacgagatcgcctttcagaccaatcttcttgccctgaacgccggcgtcgaggcagctcgtgccggagaggctggcaagggcttcgctgtcgttgcccaggaggtgcgcgaactggcgcaacgctccgccaaggcagccaaggagatcaaggtcctcatcaacaagtcgacgaccgaggtcaataccggctcgcatctggtgcaggaaaccggcgcggtccttgcgaagatcagcacgcagattgttaccatcagccagcacgtcgaaacgatcgcccgtggcagccacgaccagtcgagtgccctgcagggggtcaactccaccgtcaatcagatggaccagatgacacagcagaacgctgcgatggtcgaggagacgacagcggcgagccgcgaactcgcctcccaggccgacggcctcctcgcgctggttcagcagttcaagatcgaaggaaatggacaagaaatgagtttctcaagggcgacggctgggaaagcagaagaacagtcgcacgacatggcgtctggctccaaccaaagcgcggcttgaggttgcaaccgaactgcatatggcgtgacagaactgcatctgaagcggagtagcgaaatcggatccccagggattcacatgacaggttggacatcgacatgacgatcacatcagacaccgaacttggcgcctatctgcgcgagaggaaagtcgacctcgcacttgcacgcttggttgagagcatagcagcgtctgcaatcgtggtcgctgatcatctgaaggaagcagcctttcagaaccagatcggcagtgccggaacaacgaatgtccagggcgaagatcagaagctcctcgatgtcctggctgaccgcgtatttcgcgaaacatgtgccgaggcgacatcactcgctgcccacgtctcggaggaagccgaggacgtcacgtggttgaaacccccttccgcaggggacctcattctatacctggatccgctggacgggtcgtcgaaccttgaggtgaacctttcggtcggttcgatctttgccgtgagccaggtgctcgcagacggcgatagcaatgttctgcgcaaggggcgtgactttctctgcgcgggatatgccatttatggtccatcgacgatgctggtgatgacatttggtgtcgaagtcgttggtttcacgctggatccatccgatgggcaattcaaactgaccaatgcgcgcatgcgagtaccgcaggagacgaacgaatttgctgtgaactcgtcacgtcaacgcttttgggacgagcccatccgccgctatgtggacgagtgccttgagggcgcggcagggccgcgcggaaaagacttcaatatgcgttggacagcctccatggtcgccgacgtccatcgtatcctcacccgcggaggcgtctttctctatccggcggacgattccaatcgccgcgccggcggcaagctgcgcttgatgtacgaggccaatccgatggcgttcctcatcgaggcggccggaggtgcggcctccaccggaaccgaagatattcttcgcatccaaccacaggctcatcaccaacgcgtgtcggtgttgctcgggtcgagcaacgagatcgaacggctggtgcaatttcaccaaatccatcactcgcaagaggagatcggctcgtaaatggctctcgtcacccttcgtcaattgctcgaccactccgccgagcacggctacgccatcccggcattcaacgtgaacaacatggagcagatgcttgccatcatgaaggctgcggcccgcaccgacagcccggtgatcatgcaggcaagccgcggcgctcgtgttttcgcaggcgacgcgacgttgtcgcatctggtccgcgccgcaatcgagatgtatccgcacatcccggtgtgcatgcatcaggaccacgggaattcggcgtcgacctgtatgtcggcaattcttgccggtttctcttccgtgatgatggatggatccctgtcggaagacggtcgcacgcctctcagcttcgatgacaacgtcgccgtcacctccaaggtgtcggaaatggcgcacctcgtcggcgtgtcggtcgaaggtgagatcggccatctcggctcattggaaagcggtcgtggcgaagcagaggatgggcacggctttgacggcgaactcagccgcgacatgctgctgacggatccggaagaggccgccgaattcgtgcgcttgacgaacgtggatgctctcgccatcgccatcggcacgtcgcacggcgcttacaaattctcccgcaaaccggacggcgacatcctttccatcaagcgcctgaaggagatccacgcccgtctcccagatacccatctcgtcatgcatgggtcgtcatcggtaccattggaattgcaggaactgatcaacgcccatggcggcgaggtcaaacccacctatggcgttccggtcgaagaaatccaggaaggcatccgccacggcgttcgcaaggtgaatgtcgatacggacctcagattggcgtttacgggagcgatccgccgcgtctttgcccttcatcccggcgagttcgatccgcgcaaatacctcgcccccggcatcgaggctatggcagcggtttgcagcgatcgatacgagcagttcggcgctgccggacatgcctctgccatcaagcccctgccgcttgccgagatggcgaagcgctataaccactagttgggggcagatcatgaccaatacatcccgccggctcatcgtcggtaactggaaaatgaacgggctcacggctgatctcgccgagatcgaaaaggtcgcctggaacatcggcgaactgagagcggacgtggtcatatgtcctcccgcaacgcttctgcaggccgccgcgaggataaccgccggaagccgacttcttctcggcgcccaggattgcagtcctcaagaaggcggtgcgtataccggtgacatatccgccaggatgattgctgactgccgcgcccgcatcgtcatactcaggcattccgagaggcgtcagtatcagggagagacggacgcgatcgtcaggcgcaaggccgagactgcgctcagggccggtttgatccccgtgatttgcgtgggcgagacggaagcggagcatcttcgtcaggaaacgttggccgtcctgaaaaaccagttgcagggttgcctgcccgccgaaacaatggaaaccggcctggttatagcctatgagccggtctggtccatcgggacaggtcgtgtgccggaccaaagcgaaatactctccgctcatgcacgcatccggaccagcttgatcgacgcctttgggtcggtcggagctgggctgcggatcctttacgggggatcggtcaaacctgaaaattcggccgagattctttctcttgaaaacgtcgacggtgttcttgtcggcggcgccagtctgcgtgccgagagctttcttcagatctgcgaggcgaccaggacctaggtcacccgcccgttctgttgccgaagtccgagacaaaagtgtcgggcggacgatccacccaattgtgcgagaaatcacaagagagaagcaacgaaagcgggtgatcatgaagtcatggatgctttcgccctttgaaaagtcctgccttcggtgggtgtcgttgggcaagaccgtcgaggaaatcgccttgcttcagggcaagagcgtcgtggaaatcgaaggttacctggagaatgcgattgccgcgctcgaggcaacctcgatgcgcgaggctcttgagaaggcagacctttcggagcccgattgatgttgggccaatcactgcttcggctcagcgacagcggagccggccctgcgcccgctggtcgcatcctcgtcagggcaatggctgcgacggaaatgaaaagttcccacggggacgcacgggttctagtcgctcgcatcccgcggcgagaaccgagttttggagagtctattgcagcatgccgcactccgacatggtaacattgtgcaggccgacccgactagctgggcggaccgcgaccacgtgtcttcgaccggagacagacactacatcgtcggccgtttcagcgcctggaagggaaagtgccgttcagccctgaaacttgccttcgatgacgcccccgacgcattcgttctttacctgccgtcctccaccgcgccggagatacgtgccgggacacaacgcttccccaagacaagagccacaggttttctggaggatctcgcgcacttcgacgaactgacccctcatgaacattccagctatatcggcctttccttcgaaaaagcggcgatggtgcagcaagtgagtgaactgctggctggtcctgtcacgacggatctcgaattcgatcgtattgtcgatctgaccagcgagaaggggttgcggttggcagcactcggccatcttgtctggagttgcctcaatctttcagaagcagaccgactgtcaccggccgccatcgagcggctgtttcaggcgacgatgatcgcacttttggaggttgctcccaacagctatatgccgcgactggaacggccggtctcgccggcagtcccctggcaggtgaaacgcgcgatcgagtacatgcgcgcaaacctgtcgcactccctgactgtcgcccttatcgcagacgagacgggaacgagcgtcagagcactgcaggtggctttccaacggttcaagggcaccacgcctttgggctatctgcgaacgatccgcctggaggctgcccgcagagccatcatcggcgatggcggctcacgatcgattgctgacgccgcacgcaacgcagggttcgcccacatggggcggtttgccgccgcttattatcaagcttttggcgaaacgccgtcggatacgctccggatgcgttgagttgccagccaaagcggcgcctgaaagcggaaaagatcgttactgctgatgcggcgagaaactgccgcaggttcgagtggcatgcgtggatacatctccttcgggagcagccaatcccgctctttggtgatggcgtcctggcccagcgccggatcttcacgatcaacccataaagggtccgctagcaagctgcggccgcttcgacttcgtctcgcggtgatcgcgcccgtcgccgggccttttgaggagccatcgagcgggattggcccgctcccgaaggagcctcttcacatgtcgcacgatcttgtcctcgctcagtcccacgccttccagctttcccgcgacctcatggtcccggtcaccgtctttgaagtcgacggcgaatacggcgtccttccctctgacgagatcgacgccgatgatgacctcgcggtcattcacgagttcctcccctgggtggctcattgagccgccttttttcgttctttgggccctgccagctgccgcttgcgagcggcaggccgcaagggaggcttcgccgcggtcatgtattgcatgatccgacaattgtcagccgcgcccttgccgcctttgctcttcgcggctggtggaagtccgcccgcgaagcgacggggaaggaaggcaaagaggaaagagcatgaacagaaaggatattgaggcgcttcgcgaacaggtgagctgtgccgccgcgcttgagcatgcgggcttcgccatcgatgcgaaggagagtacccggcgggcggtcaagtttcgccgagggagcgagatcatcatcgtcacccatgaggggcgcggatggttcgacccgctcagcgatgcaaaaggcgatgtgttcggacttgtcgaacatctcgatcatgtcggttttctcgaaggcgcggggagggtcgccgacctcgtcggtttcgcgatcgcggagccggaatggcaggcgcctcggcgcgttcacggccatgacctttctctacccgagcgttggcaggcgcgccgccgtccgtggcccggctcttcgacatgggcttacctatgcggcgagcgtgtcctgccaaccattttgctccgcgcgacaatccggcaagaccgcctccgggagggtccctatggcagcatgtgggcggcgcatacggacaatgccggcattgtcaccggctgggaggcgcgagggcctgagtatcgggggtttgcctccggaggaacgaaggttctcttccgtctggggccggacacggcgttgcgcctggccgtcactgaagctgcgatcgacgccatgagccttgccgccatcgagggactacgtgatggaactgtgtatctgagtaccgggggcggatggtcgccgtcaacagagggcgcgctgcggcagctggcctcgcgagccgatgctcacctcgtcgccgcgacagacgccaatccccaaggggagatgtttgccgagcggttgcgcgcgctcgcggacgaggtcggctgcgactggtcgaggctccgcccgcccgaggaggactggaacgagaccctgaaaatcagggaggaagaaaaatgggaaagaaaggaaggcggcgtgccgcattcgcgccgcccgcgtcaagggaagcttcgcccggcggagccggcccttgacccggccggccgcgatgccggcggcccgggaggtgtcatgaaggactgaagaggatggcaaggtcgaaaggacagtgctcacgcttcggtccggacccatctcgaaggagccgcagatgatcccctctcccgtaattcgcaaagtcttccagggcgtcgcgtcacgccagcaaatgttcaagatgtttaaccggcacgtccagcgtccgaaccgttgggacggtgacgcctcgccgctttatgccggcgaatggttcgagaccggcgaggccgagcatgactacatgttcgagatcctgccaccgctctggatccgcggagccatgtttgcaatgcgcgagtttctgaccggttcggtgacatcagtgttcttcgccttgcggatcgatggcgtcatccggaatttccatggctattgcgatctctccgacgggcaagctgtcgagcgcatgcgcgtggcaatcatcgagcgcgaaagccggccggtgcgcgccatgacgcgcgaggaacgcctggaacatatctggagcatcacggccgacgactatcggggctatgccggcgatagctgggccgaagccgcgcgctgccagcgcacgatcatgctctacggtggggcagtgggcagcaccgcgaaactgctcgacgaactgaccgacgacgaaatcgcggcgaagctgcctgtgcaactgcgccacctcccctcgccgattgccgcatgaaggaggcacactatgctctccttcccgctcacatcagtccgcgaggtgatcgcccgcggtcgcgccgacgcagaagcccatggcggctttcgcaacccctgttacggcctgcgccctggcaaagaccaacagccgggtctctggctcgtcggagatcacggggtctatctgatgtccaacggcaaactgcccgagggtgccaaacctttggtcatctatgccgaggaatgtgatccccgcatccatgacgattggttcgaggtcaaacgccggacattcggcggcgatgacggcgtcgatttcacagacgcggaacagctcgaagccatgatggcggcggccccggaggcgacgcaccttcacatcgcatttcttcaggactcgatgcagctctccctgatcgcgaagccctagaatttcgcgaccggcccgaccccttcggtcaccagtccccaaaaacctgagcgtccttgaatcccgtcggtgctttccgcggggcgatgacgctcgccatttcccgaggaaaactccatgagcaacgatcccttcactctcgacatgtttggcagaagcgcgctgtcgtcaggcctcggcctgggtattacagcattcggcagcttcgacccggtcgccgccaacgacgacgaccccgaaccgacgccgccctctcctgccccggccgtgccggtaaaggcgacagaacgtccggcgccccggcggcagggcaaccggtgcaacttctacctcgacgatgcggatcgaggcttggccgtatcctggaaggatcgcgcccgcgccaatgttgcggcgatcctgatcgcaaacaacatcgagaagcaggatcgaccagccaacgcgaaggaacaggcgcaactcgtccggttcaccggcttcggtgcctcggagctggcgaacacgatgttccgccgccctggcgagatcgacttccgcgacggctggagcgagctcggcggctcgctcgaaactgctgtttcggacgccgactacgcgtcgctttcccgctgcacgcagtacgcccatttcacaccggagttcatcatccgggcaatctggtccggaatccagcggcttggctggcgtggcggccgggtgctcgagcccggtatcggcacaggcctgtttccagccctgatgccggtggcgttccgcgacgtgtccttcgtcaccggcgtcgaactcgaccccgtcaccgcccggatcgtcaagctgctgcagccgaaagcgcggatcatcaatggcaactttgcgcgcagcgatctggcgccgatctatgatctcgcgatcggtaatccacccttctccgatcgcaccgtccgatctgaccggacctatcgttcgctcggtctcagggtgcacgactacttcatcgcccggtcgatcgacctgctcaaacccggcgcgctcgccgccttcgtcaccagctccgggacgatggacaaggtggatgcgacagcgcgcgagcacatcgccaaaaccgccgacctgatcgccgcgatccgcctgccggagggcagcttacggagggatgccggcacggatgtcgtggtcgatcttctcttcttccgcaagcgcaagctcggggaaccgacaagcgatccgtcatggctcgatctcgaggaggtgcggcccgaaagccaagacgaaggcgcaattcgcgtgaaccgctggtttgcgcgacatccagagttcgtgctcggcgatcataacctgacctctgggccatttggcgaaacttacacctgccggccgcgggccggcgaggacttggaggcggcactgcaggaggccattcgcctccttcccgaaggccgctatgacggcgagccgaccgcaatcgacatcgaccttgaggacgagctcggcgagatcgtcgatcttcggcccgagaaccgacaggtcagagaaggaagtttcttcatcgatatcagccgcggtcttatgcagatggtcgacggcgcgcctgtcgaggtcaaagtccgcaaggggcgcaccggtgacggcatcccggaaaagcacgtcggcatcatcaagaagctgattccgatccgcgacgccgtgcgcgaggtgctgaaggcccaggaacaggatcggccatggcgtgaactgcaagttcgcttgcgcatcgcctggtcgagcttcgtgcgcgacttcggaccgatcaaccacaccacggtctcgatcagcgaggatgaggaatccggcgaggtgcgcgaaacgcaccgtcgtccgaacctgcagcccttcctcgacgatcccgattgctggctggttgcctcgatcgaggattacgacctcgacaccgatacggcgaaaccaggcccgatcttttccgaacgtgtgatctcgccgccggccccgcccgaaatcaccagtgccgaggacgcgttggccgtggtgctcaacgaacgcggtcgcgttgacgtcgagcatatcgccgaactgctgcacaggccggccgacgcggtggccgatgaactcggcgatgcgatcttccgggatccggccgacggatcctggcagacggccgacgcctatcttgccggcccggtccgcaccaagcttgctgttgttgaagctgcggcggcgctggttccagcctacgagcgcaacgtccgagcacttcaggcagtccaacccgccgaccttcgtccgtccgatatcaccgcacgcctcggtgcgccgtggattccggcgagcgacgtcgtcgccttcgtgcaggagatgatgggcgcggagatcaggatccaccatatgcctgagcttgggagctggaccgtggaggcgcggcagcttggttatagcgccgccggcacatccgaatggggcaccagccgccgtgacgccggcgaactgctggccgatgcgctgaacagtcgcgttccgcagatcttcgacaacttcaaggacgccggcggcgagcggcgcgtgctgaatgtcgtcgataccgaggccgcccgcgacaagctgcagaggatcaaggaagctttccagaactgggtctggaccgatcccgatcgcaccgatcgtctggcgagggtctataacgaccgcttcaacaacctcgcgccaagacgtttcgacggcgctcacctcaaacttcccggcgcctctggcgcctttgttccttatgggcaccagaaacgcggcgtctggcgcatcatctcctcaggttctacctatcttgcgcatgcggtcggcgccggcaagacaatgacgatggcagctgcgatcatggagcagcgccgcctggggctgatcgccaaggccatgctcgtcgtccccggtcattgcctggcacaggcggcgcgagagtttctggcgctctaccccaatgcccgtattctcgtcgccgacgagacgaacttcaccaaggacaagcgagcccgcttcctgtcacgcgcggcgactgccacctgggacgcgatcatcatcacgcactcggccttcaggttcatcgccgtgccgtctgccttcgaacaacagatgatccacgatgagctggagctctacgaggatctgctgaccaaggtcgacggcgaggaccgcgtctcgcgcaagcgcctcgagcggctgaaggaaggcttgcaggaacgcctggaagggcttgcgacgcgaaaggacgatctgctgaccatctccgagatcggcgtcgaccagatcatcgtcgatgaggcgcaggagttccgcaagctttccttcgcgaccaacatgagcacgttgaagggcatcgatccgaacggctcgcagcgcgcctgggacctctatgtgaagtcccggttcctcgaaacgaagaacccgggccgcgccctggtgcttgcctccggcacgccgatcaccaacacactcggcgagatgttctcgatccagcgcctgctcggccacgaggcactcgccgatcgcggtctgcacgaattcgatgcctgggcgtcctgcttcggcgatacaacgaccgagctcgaaatccagccatccggcaaatacaagcccgtgtcgcggttcgcgagcttcgtcaacgtcccggagctgatcgccatgttccgggcctttgctgatgttgtcatgccggcggatctccgcgaatacgtcaaggtgcctgaaatctccaccggccggcggcagatcctgaccgccaagccgacgcctgccttcaagacttatcagcagatcctcgatgcccgcatcaaggcgatcgagatgcgcgaggggccggcgcattccggcgacgatatcctgctctcggtcatcaccgacggccgccatgcggcgattgatcttcgcctcgtcatgccggccaacgacaatgaggaggataacaagctcaacctcctcgtccgcaatgcctttcggatttggaaagagacgagcggggccacgtatcttcgcccagacggcaagtcctatgacctgcccggcgccgcgcagatgatcttcagcgatctcggcacaatcaacgtcgagaagacccgcggcttttccgcttaccgctggatccgtgacgagcttgtccggctcggcgttcccccgtccgaaatcgccttcatgcaggactacaagaagacggaggctaagcagcggctgttcgccgacgtgcgcgccggccgggttcggttcctgatcggatcgtcggagacgatgggaacgggcgtcaacgcccagctccggctcaaggcgttgcaccacctcgacgtgccgtggctgccgtcgcacatcgagcagcgcgaaggccgcatcgtccggcagggcaatcagcacaatgtcgtggacattttcgcctatgccacggagggcagcctcgacgcttccatgtggcagaacaacgagcgaaaagcccgtttcatcgcggcggcgctgagcggagatacttcgatccgccggctcgacgacctcggtgacgggcaggccaatcagttcgccatggccaaggcgattgcctccggcgacgagcggctgatgcagaaagcgggtctcgaagccgatatcgcccggttggaaaggctgcgcgccgcccatgacgatgaccagtatgcggtgcgccggcagatgcgcgatgcggaacgtgacatcgaggtgtcgatccgtcgcatcggcgagatcgctcaggatatcggacggcttgtgcccacagcgggcggcgcgtttgcgataaaggtccttggcaaagactacgatgagcgcaaggaggctggtcgcgcgctgatgaaggaaattctcacgctcctccagctccagcaagagggcgaggttcacctcgcatccatcggcggcttcgatctcgtctatgagggcgagcgcttcggaaagggtgatggttatcgctacgcaaccacgctccagcgcaccggcgccgactacgagatcgatcttgcggtcaccgtgacgccgctcggcgccatttcccgcctcgagcatgcgctcgacgggttcgaggcggagcgtgagcgctatcgccatcgtctggatgaagtacaccgccggctcgtctcttatcgctcgcgcgatggcggcactttcgctttcgccgacgaacttgccgagaagcgccgacagcttcgcgacgtcgacaatgctcttgccgcagcgtcaattcaaaacgacgacgccccggcggaggctgcttgatctggagcagcggttttgatgcaacgcagcatttgcatagctgcattgcacaatatttgctttccttccgatcgaaatttgagcatagtgctcgcagctgatgcacatggcggatttcctcccagtgccgccgcagcagctgttcccctctggaggtttaattaccttcatacctatagggccacgagttttctcgtggccctctttttttgtcgtgatttccgtttgtcgatgcgacaaccatgacgatcgcgtcgtcggcggcctcaccgcgctcaggaaatcagctcgacacgctcgatcgtttggatcagccgcgctaccgcatcctccgggtggttcaggacagtcacgacatcggagggactcggatccttcaaacctactttgtagatcgcaatcccagcatcgacattctcgtccatagccttcagcccctcgaaatgttgggaggcctcctgccgggcgagccccaaagtttcggtgaacaccaggatctcgtccgttcccggaaccacctgataggcaaatatctgtttcgcatcgtgcatcggaacctccttgagctgcgacagcctaaggcgcctttccggttgctgtgaactattaaaagtatgagcggcagcgtcccgaaggtgggaggacaaaaagaaggaagcggagaaagaaaccggtcgcagatcggtccggccgtcgtcgcttgtgctcaaccgccgcctccgcatcccggccacttgtcccgcgcagggctgggagccccgcttgtccttcgcagcagggacgcccggccgcagttgcgccggtccgcccgcccccggtccgggaggtgtcttcgaaagaaatgaagacaggaaggaccggcaagagagccgcgtcccgcatcccggaaaaggaaaatcccatgcacatcataaaggtcgatccgcgctcgttgaaggacaaccccgacaacacccgtcagtcgaaatccacgccgcaggccgatgccctgttgctcgccaccatcaaagctgtcggcatcatccagccgcccgtcatctttcccgaggtcggtggcgggaatggctacgtcatcgaagccggccatcggcgcacccgcatggcgatcgccgcgggcctcgaagaaatcgaggtcctcgtcgtcgaagccgccaatgataatggcgccatgcggtcgatggtcgagaacatcgccagggagccgctcaaccctgtcgaccagtggcgcgggattgaacgcctgatcgcactcgattggaccgaggaagcaattgccgtcgcgctcgccctgcccgtccgacagattcgcaaattgcggctgctcgccaacgtgctgccggccatgctcgaccagatggctctcggcgacatgccgaacgaaccgcagcttcgaacgatcgcggccgcacacctcgatgagcagaaggaggtctggaaggcacagaagccgaagaagggccagcctgccacatggttccagatcgccaacgcgctgagcaagacccgcatgtatgccaaggatgcgagcttcggcgacgatctgagggaagcctacggcatcgaatggatcgaggatctgtttgcccctgccgacgaggacagccgctacaccaccaacgtcgaagcctatctcggtgcacagcaggaatggatgaccgacaatctgccgaagaagggcgtgatcgccgaggtcacgcaatggggcgaggcgaagttgccgcagaaggcaagccgcgtctatggcaagccaagcaagggcgaccacaccgccatgtacctggatcggaacggcaaggttcagaccgtccattaccggatgccggaggagaagaagaccgcgggcaaaggaggcgtcgttggaggtggtgccaccgctggcgacgatgtgatcgacgcgccgaagcagcgacctgatgtcacgcaaaagggccacgacatcatcggtgacttcaggacggacgcgctgcacgaggcgctcgcccgcgcgccgatcgaggacgacacgctgatggcgctcctcgtgctcgcctttgccggcctgaacgtccgggtcgattccggggtaaatgacaccgtcttcggtgcgaagcggtttgcgcgccacgccgctcggctgatcggcggcgagggcaaactgtccttcggcatcgacacattgcgggtcgccgcgcgctcgatgctggtcgatgtgctgtcttgccgtcgcggcatgtcgaacagcggtatcgtctcgcgtatcgccggcgaggccatcggcgcggatggatatctcccgaacatgggcacggaggacttcctgctttgcctgtcgcggcaggcgctcgaggcgtcgtgcaaggataccgcggttctgccgcgccaaaaggtccgcgagactcgcgcagcactcgtcgagcacttcaaggaagggcatttcgtccatccgacagccttgttcgcgccagacccgaaggaacttgccggactgctcaagcaaggcgagatcgtcgaagaggaagacaccgccaacgccgtggaagcgacggatggccttgaagacgagctcgcggacggcggcgccgccggcgaggccgccgatctcgacgcccccgatccggaggccggtgacggtgctcccgacgaggatgaaaccgcctacggcattgcggccgaatagtcactcttcccttctcatccgatcgacacccgccgccggcctcaccggcggcggtcttgtttccatcaaccgcagaatttcaaggagatgtctgatgtctgcgtccctgatctacgacctcgcctcgatcggctccatcgtcgcttggtccgacgggcacaccacgcccgcccgggcgttttaagaagaagctggcgtcctggcagacccgcaacaacagcggccgcttgatccgcaaggaaggtccgcgccaatccggcaactgcgcctcgccgggatatttcacgctgcatgaggcggccttcggcggcaagaataccgtcgtcatccgcattcaccgaaccttcggtctcgattcgaacctgaccttcaaggttctcgaacgccccgagctcggttctatccgcgtcttcgatcgcgccagcgcgaacgccgagctcgtccatctcgccgacaatcgcgagacggctgcgacctggctacaagagcatggatacccgaacgctgtccttgaagaggtaaccgccgacgagattgcggcggctcatgtcgaagggagggttgccggatgagcacgcccgatcttcaatacgacagggttccaaccgccgatgacccgtcggtggaattcggcaccagcgccgacggctttccggtcgcccggatcgccgatacgctcctggcaatggtgccggcgcgcgatggcgccagcttccttgcgaacgcctggcgcctcactcgcccgctgtcagagctgacacgggcggatttccacggtcgcgaaggccgccttagagatgaggcagagtttcgcgcgcgtgtgttcgagaccgcgcggcacagccatgaacgatccgcgctcgggcggatccagacccgcatggcagcgagtacgccgtggggtccgtcgcagctcgcaacgatctatgccgaggggatcgtctcccatatgacggccggccaacgcgggtttcatctgtcggccgagcggaatgcgtgcgtccttcccatgctgcgaaagttctcgccctggtacgaggaagacgcggaatgggcgatcgtcgccctcaccttcccagacctgttcacgtcctacgagcgcaaatgtgccgacgagacgatccgcaacagctcgccgtccgcctgggaggagatccacggccgcgaactggcgcccggccaatcctggacaaaggaccgagaagccttcgagcgcaagtatgccggcgactggattgtgatctccgcgatcttttcgagccaccatgccgacatgacagaggtggtcgcgacacggggcggcaggcgcgatgggcgggcggaggagatgcgctttctcgtgctccgcaccgaatacgccgcgcgcgaccgcttcggtttcgtcatcgatcccaaccgccacgatctctatgacggcccttccagctttgtgcgttggcaagggagggttgcgtgatgactgcaacgccaatctaccatgcgcaactgtcgcgtatggaagaagcgcggcggcagacgcagcgccagttggaactgatcgatcgccaggtcttgcgccggatatcatcgatcctgcctcagctcgcgcgccggcaaaccggatatcggcgcgggaaggcgccggatgccggttctttcctcgaacgctatcgcaacaatctcgccgcccctgacggcggagcgtcagctggaagttgatgcgttgacacgaaaactggcccgacaggatgctgcgatagctacctttcgaacacggttcgaacccgttggtgacgcggctcagccacgagaggaggtctagcgccatgggaacgatcggagacctcgaacggagagcgggcattgggcaatcgtccgcggagcgcaccgcgttctggcagcagttccaccacctcgccggacaggcgtgcctcgacgctggcgtggcggagctcagacgaatgatcgccgcgaaggaggggctggctcaagtcactccgagtaggcgcagcggagtttcgaaacgcgaacggcttcctcctttgaccgctgaacaggacgcagcactcaagacctatgccgtaaaacacgggcgtcgctggaaaagcatcctgaaccacgtctggatgggtggcgcgccctatgacgatggcgggacactccgcggtcttcgaaacacgcacggtccgagctggctgcaatcttaccggcttcccaagccgaaaccttcggccgagaccctcatcgcgccaattgagcgtgaggcgagttcgggaggtgacgacgtatagcgtcatcggcagccatattcctctcaacacctggttggactggagccgtgccggtttgccttcggttttgctgcggtctgaaccagcggccggtcgcttcaaggccgctttgcgccgcgaggcggccggaaccgccgtccttcacggagcaggctcgcgggcgtcgcagggcaggatgccccgcttgcccgcaaaccggctccgctctgcctgtcgtctccggaccttgaagcgcccgtcttccgccggttcgaggcgaccgcaccgaacggcaagccggcatggggccggagccgcttcgaggtgaaaggaagaaatcatggcaaagcccgctactccccctcgtcagtccgcccgcgtcgtggccctgcgcaaaggggcaaccctcgaaatggtccggctcacatgccccgacagtgcccaggcgctgaagatcgccgagagcttcggaaccgcgatcgtcgatagcgacggaatccgtgatctccatgagcgcctcatctccgagacggccgatgctctgagcgatggcctcggcgaaaaggccatgcagatccatctgcagcggatcgtcggcgcttttgtcggttccgcgcacggtgcaggccagttctatagccgcgccgtcaccgaggcgcgcgacgccacggccaaagcggccaacgacgcccgcgacgaggacctcgacggccctgtcggctacgacagtgctgcccagcgcagacgcgagtttgccgccgacatgggcgtgcaggctcatgcgcttcggatggcggcggagggcgccgttgcggcatacaagcaaatcgtcggcgagacctggaagcccttcgatcgccccgtcgaaaatccgggtcactctctcgatcgcaaggcggccgaggcacagatatcggccttcgactaaagtgcttcttcggcggggcttcggctccgccttttccatgacgaggagcaagccgccttggaaaagctcgcacaatgatctacattagtttcgagaattatctacatggaggcggctcatgccgatcaatgtcaacaatccggaagcagacgctctgacgcgcaagttcgccgagatggccggcgtcggcatcaccgacgcaatcgtgattgccatgcgagaggcgatcgagcgtcgcaatcgcacggaaacgccattgcagacagcggcgcgcttgcgggaaaagcacggggttgcgttgagcgacgacgtccgcaagcctcttccccgtgaagccttcgacgaaatgtgggatgacgcctgatgttcgtcgatgcctgcgcgatcattgcgcttctgtccgatgaagcggaagcggcgcgcgtctccgacgccgttgcttctgccaggcacccattcacgtcaccggtcgccattctcgaaaccgtcctcggtcttgcacggccggacaagttcaatcttccagtgcccgcagtcgaaacgatcgtaatggaattcctcgaagcgcgggcaatcgaggttcgcgatctcccgcccgcatccgagacgacgcggctcgcccttgtcgctgcgcaccgctatcgcagcggtcgccatggcctgaacctcggcgattgcctgcattatgcctgcgccaaattccatggcgtcccgatcctcgccactgcgaacgagttcagatcgaccgacctcgaaaccattccctgaagctaatgaagcagtgacgccgagatcggcccgtcgcgaccccgcccggcttttggtcctggcggagcgaggcgttcgggcaacggcttcgccgtcctccacgtccgttccggcctgccggtgccctcacaccttgccgctccgccctttggaccgccgtgacggggtcgcgatcggcgcgacctccttgaaatggaggtttgaaatgagcaggaaggacgaaggccaacgcgccgacatctacacgcggatcaccgacaagatcatcgaggatctggaaaaaggggttcgcccatggatgaagccgtggagcgcggcaaacgcgaacggtcgtattacccggccgctgcgccacaacggtcagccctattccggcatgaatgtgctcctcctatggtccgaggggatggcgagagggtttacctctccgatatggatgaccttcaagcaggcgctggagctcggcgccgcggttcgtaagggcgaaaccggctcgaccgtcgtgttcgccagccgcttcaccaagtcggcgaccgaccgcaacggcaacgatgtcgaccgggagatacccttcctgaaggcgtattccgtcttcaacgttgaccagatcgacggtctgccggaccactaccaccatcgtccgacaccggtcctcgatccgattgagcggatcgagattgccgaccgcttcttccgtaacaccggcgcagtcatccggcatggcggatcgcaggcctattattcgccggtaaccgaccacatccagatgccgccgttcgaaaccttccgcgacgcggcttcctacgcggcgacgaagagccatgaggtgacccactggacggcaaatccgcgacgagtcggccgcgatctcagccgatattcgaaagataagagcgaacgcgcccgcgaggaactggtcgcagagctcggcagttgctttctgtgcgccgaccttgggatcgccccggagctggagccaagaccggatcacgcctcgtaccttcagtcctggctcaccgtcctttcaaatgataagcgggcaatcttccaggcggcggcgcatgcgcagcgcgcggtcagctatcttcacggcctgcaggggtccgaggagggtagcagcaaggcggcggcatagggcagctttggatcagggacggtcgtcaacgccgacggccgtctttttgattggctctcgttcggtctgcggatgctggttcagtgtgaggtccaacttgccccagatcgatgccttcttggcatcggacttgggtttgcgggaagggttcctctcgacgacgaacggctttgtctgctgacgcataaatcctcctgggcgacgaatcgcgcctgaacgatatcgcgcgcgccaccgaacgcaacagactgtcattcaacgtttcataccgacggtttcgacggcatgacgtccaacgccattggcgacgaagggaatttacatcctcccccgcctgttcaggttgtttgcaaggagcacagttcgccacatgggttgttgcggaatgctgcatcgcacaaatataggtgggcttgcgaatataccgactggggagggacaggccgtggaaaaatacgtgggcgcgaagctgcatggcattcgagtgaccgacgcaaagctgaactaccacggctcgatcacgatcgatgcggacttctgccgggaggtcggcctgaaaccgctggaatatgtggagatttggaacaagatgtccggagcgaggatcagcacatatgtgctctacggcgatcccggctccaagtgctgcattctcaacggtgcggccgcccgcacgtgccagcaaggcgatgagattatcatcgcgtccagcgtcttttgcgaaatcgatgacatcatcaagctcaagccacgcgtgctggtcttcggagaaaacaacgaaatagtcgacaggatcacctacgaggtctttcgccgtgcagacaattctctcgatatggccgtgatctccgagcttcccgacaacagctacggatttccggcctccatttctgcgtagcactaatgcagtcggccggcgtccctcgacgtttgccgatatggattgccgccgtaccgctttctgccgttggccctcgacgggaaccattgccacatgcctttgcctgacgttagccgcgctccattcgcgggctcgatgaggcatgtctgaccggagagcggctccgcctcgatcgtcctcccgcaacggccgtccgaaactttcttcccctggcggcaccaccgccattcctcgcgcgacaacaaagttcctccaggccgccctccatttcatttcggccccgtgggtgcggtccgatcgtccccggtccttgcgacagccatcgaggccgcaatggcgcggcccgaaacaccaaaaggaacatgacaatggctaccatcggcaccttcacctccaccgaaagcggcttctccggctcgatccgcaccctcgctctcaacgtcaaggcccgcatcgcccgcgtcgaaaacccctccgacaaaggcccgcacttccgcatttacgccggcaacgtcgaactcggcgcagcatggcagaagcgctctgagcaaacagaccgcgactacctctcggtcaagctggacgatccgagcttccccgcgccgatctacgcgacgctggccgaagtcgaaggcgaagacggtctgcagctgatctggtcgcggcccaaccgcgactgaggtccggccgaggccccgccaccgagcggggccaattggccgcagtacacagcatttacagcaatgctgtaaatgctgtatttatatcgagacagctatggccgactcgacacggatacaacggagataaacatgacccgtaccaatggctcatattcaacgagcgatctctcccgaaaatccggagatatcatcgcggaagctctgcggcatcccgtaacgattacacagcgcaacaaaccgcgcctcgtgctcctcaacatcgatgactacgaacggctgatgcggcaatccgatgctcgtaccgtcggcacgctcgaaaccatgccgcgcgaactgttcgacgaattccaggccgcggtcgatacctatgcggagaccgacgaggttaaccgatgagcggctatgacgccatccagaccgcgacggtcatccgttatccctatctttgggcgagagaggcaggcaggggcgagactgaaggccgcaaggatcggccggtcaccgttggcgtaaggctcccacgacccgatggagatttggtggtgtttttcccgatcaccacgaagcagccggaaaaggcccgctttgcggcggaaatccccgccatcgagaaacggcgggccgggctcgatgcagatctgcggctctggatcatcctcgatgagttcaacagcgacgtcgtcggccgctctttttacctcgagcccgaaccaccactcggccggttcagcaaggccttcttccttccccttctccgggagtttatcgcgcgtcgcaaatcgtttatcgaaatcagccggtccaaatagtacacgaagggtttcccagccggattgcggggttcggccggatttcgcgctcggccgacagaaaccaggtgaaggagtggtggagcgacctgccaaattcttccgatgaggccgtggcactcgaagccgtttgacggtggatcgccggcgtgatcgtgccgagtgccggccggagggccgctcggaagtctgtcggcgtttgtcgcctcgccttgttcatccgatcgctgtcacaagccagatcctccgcaggctccagctgatctgctcccgccccaaccccgatgaggtcctcggggctccggccatcgggcgggcctcccgctgtgacttttgccctccaccatccatattggatggatggaaaaatggagcccggtatgtcatatcccattcggatggaaacggatgggagaatggatgacggctcttgatcttgcgaaattacgcataacgcctgagatcctatcgctgatcgccgaattcgagggtgcgtggcgagcgcttggtcgtattgcgcccgaccggctgtccagcttgccgacctcgcgcttggtcgaacgccgggcacaatccggacagacgagtttttcctccggagctgcagcgccagaagcagcggctcgcgcgcaagatcgagcgtgaacgcatcctgcgctgcgacctgccggagtttcggtcgcgatcctcgaactggcgcatgagcacgggcctgtcacggtgatggacgcggccaaggccgcaggcgcaagccgcaacactggcaaggatcatcctcgggcgttgaccgagcaggggcatctgacccttcatggagcgggtcgtgggacctggtacggcctgacttaaaactggagtgattggtccgccgatgcgcagggatcggagctacggcccaactgtgcgcggccgccattgccgcatgcctttgcctgacgttagccgcgctccattcgcgggctcgatgaggcatgtctgaccggagagcggctccgcctcgatcgtcctcccgcaacggccgtccgaaactttcttcccctggcggcaccaccgccattcctcgcgcgacaacaaagttcctccaggccgccctccatttcatttcggccccgtgggtgcggtccgatcgtccccggtccttgcgacagccatcgaggccgcaatggcgcggcccgaaacaccaaaaggaacatgacaatggctaccatcggcaccttcacctccaccgaaagcggcttctccggctcgatccgcaccctcgctctcaacgtcaaggcccgcatcgcccgcgtcgaaaacccctccgacaaaggcccgcacttccgcatttacgccggcaacgtcgaactcggcgcagcatggcagaagcgctctgagcaaacagaccgcgactacctctcggtcaagctggacgatccgagcttccccgcgccgatctacgcgacgctggccgaagtcgaaggcgaagacggcctgcaactgatctggtcgcggcccaaccgcgactaaggtcctcgaggctccgcccatccggcggggcctccccccccgccaaaatgtgaagccggaaccaggcgtcgagcccgcttccggtttttttggtgccatatgggaacggggatagccgctcggatctcccgatggtgccgggccgggccggcagcgtcaaggacgagcggttagcccccaaatttcaggcccggtcctgcggcccgaaccagaaattcggctcccccactcgccgcctccggcggtcgctaacgcgatccctgacccggccatcccgtcccaccccgcgagctcgtctttcgcgaactcaaggagatgagaccatgacgatcgaacaacatatcgaagaactgcgggccgagtcgaacaacacatgcgacgcagccgagcgccgccagatcgagaccgaactcgaccttgccagggccgagcttgccgtgcacctggccgagcgggtcggctccatcgacaccgagccgcccttctgaggcggctcacctcgtttcaaggcgggctccgttcgacaatcttcttccccgattcaacgcttccgcttgaggaacgccgcgtcgtcgcgtctctcctttctacagagctgtcatctacgttgcgggatgttgtagccccgcgccctcttctgccgcgtcaggtcgaggaacagtctgacggcctcatcctcccgcccgaaatgatggaccatcatctgccccgatgtcccgatcctgccccagcggcgcgtcaggcagatttccccgaacagcgagacagatatctgcatcgcgtagaagcgagccatgttcttcgccgtgtcggttcgttcgatgtagagctggtaaggttgcgtgaccatgcgcacagagtcgccgatcgccgccagagcgtctaacgacagttttgaatcgttggagacctatcgattcattgcggtgatgtttcgcgagatctgaacgattatccgggcgagacggctcagccgcactgctctactcgctggcgctcccggggtccgaaaacggtctccgcgcattcgcgtgacgatcctctcgctggaaccacgcgacaattctcgtccgatcgggtctgacgtgacaggccctccaatccagaccccccaaattatctggagacgcgcgttggccaacatcgttaaaagtttaatctaattttcattctctctgaataactattacacaacgatcagattgggctgtgcgaaggtcatgcgaacaggtgcagatttcctctgccgctcagccgacttcgcttcggcttggttgcggcgaaagggacaaacacatggctgccattatcgacttccccttggagcgcagctgcagcgctcagcagcgtgcgctcatcgataatgcggagcaggaaggcgctcggtttctcaaggcagccgagactttgcttggtgtgttgcggcaagccgaacgaacgcaacaggcaattcttgcctatcaagccgagatgaagggccggagcgaaatcattcggcacacagatagtcgcggagcggatgaaattcctgcgtctggtgaagcctgccgcagtggcaacactcggcaagcgaccgatggctgaagttttccggcgggtcggggatcgccgccgtcatgaacccacgtgaggaaaaagaccgtgtttagcttcgtaaaaaagagacaatttgctttcctgctggcggcagcactcctccttggccatggtgcaagggcggaagacgtcaacttgatgaacggggtggtcgcccgtcccggcgacaaagatacggtaccagcggacaaattcaaaaaggctagcccgtggaaaatcggaatgagccatttcggcgtcagcgccaacacctgggctactcagatggccgctgagtctcaggcggccgccaagagcgatccccgcatttcgcagttcgtgctgctcgacgccaatctgagccaagccaagcagatcgccgacatcgatgatttgatcgcccagaaggtcgacgccatcatcatcacaccggtttcgccgacttccgcggacgcaggtatcgaaaaagcaattaatgccggcattcccgtcattgtccatacgggccttaccaaaaccgacaaattcacggtcgatattcagggcggtggcgagaatttcggaaaggtctcgggcgagttcctggtcaaagaactgggaggcaagggcaatatctgggtcctacgcggactgccaacccatccggaagacatcaatcggtacaagggtctcctcgaagccatcaagggtacggatatcaagatcgttgccgaggacgccgggctttggtcgtatgactacggccacaaggtttgcgagacgttctatctcgaaaaccgcaaggtcgacggcatctggtcgtcgggcgccgatatgagccgcgcctgcatggatgtcttacagcaatatggcgcgaaggttccgccgatcaccggcgaggtgaacaacggctttctccagaaatggatcgaaagcggggttgatgctatcgccaccgaatacgggccggaacaaggagccgcggctgttcgcgccgccgtcgcgctgctcgacggcaaagccattcacaaacgctatgtttatgagccggacggttggaacctcgaaaaagcaaaagcgaattaccgtcctgacctatcggagaagttctggatgccaagcagcctgaccgacaccgacctgaaggccctgtacggcaagtaggcaaatgcctgcccctgcgttaccggggctcgatgaacgtcaaaagttgatgtcatcacgaaactatacgaacaaccctaccgagcgtggcgagatcaaagcgcccactgtcgccccgaatccaaggagccgtcttcgatgacaccagcaacagcgaaatccaacgaccgacgtaatttcgggattgccggacgcttgacggcggcttttgtcggcattgcggccctcgcagccatcgccggcgcctcctcgtccttgtattcgatgaaaagctccggcatcgtcaaggagctcggcgaccgaacactcccgaccgtgaccgaatccctcgccttcgcgcaggaaagcgccatccttctcgcagaggcgcccaatctcgtctatgagccggatctcgcttcgctcgacgcaagttcgaagcgcctggaagccatcctcgccggtcagagcggccgactgacggccttgcgtgacttgggggtggcgccggagctactcgattcagtcgagaagacaagccaaagcctcgaaccaaagctcaatcagctgacagccatatcttccgaccggatcaagtcgaagttccgcatgcaggagggtgtggctcgcgctctgtcccgttacaagtccctggcgtccatgctccgcaacgcgcaggccggagcggcggacagcagcatcgagcgatcgcgtgccctgaccgacctccagatggcggccgcccagatatcgaccctgatatcggcgataccggatgcgtcagagaccgaactgcccgccgtcaaagatcaatatgatgccaccggcaaggagattgacagtatactcgcgcggctgaaagcttcaggtggcagtgccgccatgcaacagcttgtcacggctctccaggacgagggcggaggtcctgaaggcctgtttgcgcttcgatccgctcaagccaagcttaacggtcagatcgcagatatgctgaatgatctgacggtgacctccatcatcctcggagtcgacgtcaaattgatcgcggcgaaggaaaagcaagctgcccgaaacgccgcggaattgtctcgaggaatgacccagcagactgtcgcggtcaatgcggcaacgagctttctgttgattgcggccgcgcttgccgccctgttctacgtccggcgttccgtgacgcggcggctgatcaggctcgcgacggtcatgggccgtatcgcctccggtgatcattccactcaagtccccatgtccggccgtgacgagatcaccgacatggcgggcgccgtcgaagtgttccggaccaatgccgtcgccaacatccgcctcgagcaggaagccgaggaacaacgcaacctgaccgaggaggatcgtcgtcgtaaggccgagagcgatcgtgtccgcgccgaggcgatggcacaagccacctacggcctcggtgaagggttgaagcacctttctgcgggcaatctgacgttccgactttccgcgcctttcgcggatgaattcgagacgctgcgcgccgatttcaatgccgctgccggccagcttgccgagacgctgcgcgccgttgccgatgccacaaacgccatcgacagcggcagccgcgaggtcagcgtcagcgccgatgacctctccaaacggaccgagcagcaggctgcctcgctcgaagaaaccgcggcggccctcgaccagatcacggtgaatgtcaccaattcatccaagcgcgccgacgaagcccgcgcgatcgccgcccaggccaatgccagcgccgctcaatcgggtcatgtggtggcgagcgccgtcgacgccatggagaagatcgaacagtcgtcgaaccaggtctccaacatcatcggcgtcatcgacgaaatcgccttccagactaatcttcttgcactgaatgccggcgtcgaagcggcacgcgctggtgaggctggcaagggcttcgccgttgtcgcgcaggaagtgcgcgaactggcgcaacgctccgcaaaggctgccagagagatcaaggatctcatccgaaactcatcggtcgaggtgcagaacggcgtcaagctcgtcagcgaaaccggagcggccttgaaaacgattgagggctatatcgtcaccgtcaaccagcatatggacgcgatcgcgatatcggcccgcgaacagtcggttggtctttcggaggtgaacaccgccgtcaaccagatggatcaggtcacccagcaaaatgcggccatggtcgaggagagcaatgcagcaagcgcgacacttgccaacgaggccgggcggcttcgtgccttaattagccaattccagttcggcgatgcggtacgccgggcggtttccatcagtgaggtcagcccatccacccggcccatcgcatcgccggcgcgtcggattgcgagtgctgtcgccaaagccttttctggcaacgccgcggtcaagcagacctgggaagagttctgagcaacgtggggatgaagtcctccccaaggcgcacggatacaggttcaggtggtgcaagagggtgcgcaacgcgcaccctcttgcacttagattccatgaacatcaccgcggacgcggactcgctcgtcaaaatcccgtgtcagccgatccatgtcatttgccaccttcggcaaaatctcctgtagcgctactttactctctttcggtaaaccggattgggcgctccgcgcctcgctgcctgcagttccgtgctcttctgtcgagattgcgtcaagttccggagttttctcgcgattggtttttctccgatcggacaaacgaatgattgaggtctcaccaacgacagtggcttgggcgtgcgatggttcgggcgatttcaatgagtctttctgctcagcgtggctcgcttccgtgctccgctgaagttcgagcgcttcggtctgcacgatcggcttgacctcgccacgtgctgccagaacttcctggcgttttgcgatccggtcgagcgtggctgcgtaatccggcaaggccgggaatttgtcctggtagagctcgctgccggacttgcccagttggctggccaagatatccctgtcggccgtatccgcacgtgcggtgaagagttgcgtccgctcgtcggccttgctcagcaaggcgctgttggcgttgatgccatgggcggcgttgtgcaagagatagacttggtcaacacgtttgccatcgtcatgtcgggtgagttcataggcagagccgatgaccgtcgtcgggccttcgatcttgtagcccttaacgcccctatcgcccggctcgccggtgctggcctcgaaggtcttgctctgactgctgccatcgggtttgaaggtaacggatttgccgtcgacgttttcgatccggccagcttcgcccgcaacgagattcctatagctgctggtgacgctgagcctgtcgccgatcctgaaacgaatatccttgttgttgaacgccttgaaggtgacagggtcgccgctcaggcggccggatgcaaggccctgcttttcgatctccttggtcagtgcatccacatcaacgcgccggttagcatagagcatgcggaccttctcgggatcggccttgatgtctctttcgtaagcatccgccatcgctttcagggccgaccctgcatccgcgttctcgacaagggagccggttgcgaccaatgtttccacgagcttcttgtgatcaccaccctgcagggcttcgacgacagatttctgactgtcaggcgtccaatgactcgcctcgggggacgtctggtgcgccaactctatttggatagtgggtctttcctcgccacgtgccgtcagaagttcctgacgtttcgcgacccggttgagagcggctgtgtagtctggcaaggccgggaatttgtcctgatagagctcgctaccggacttgctcagttggctggccaagatttctctattagccgtgtcgctgtgcaaggtgaaaacctgcgttcgctcgtcagccttgctcaacagcgcgctcgcagcattcgagccgtagatgggattgtgcaagagatagacttggtcaacacgtttgccatcatcatgtcgggtgagttcataggcggagccgatgattgtcgtcgggccttcgatcttgtagcccttaacgcccctatcgcccggctcgccggtgctggcctcgaaggtcttgctctgactgctgccatcgggtttgaaggtaacggatttgccgtcgaccttttcgatccggccggcttcgcctgcaacgagattcctatagctgctggtgacgctgagcctgtcgccgaccctgaaacgaatatccttgttgttgaacgccttgaaggtgacagggtcgccgctcaggcggccggatgcaaggccctgcttttcgatctcttcggcaagtcggtctacatggtcacgcttgttggcatagagagcgcggaccttctcggggtctgcgctgatgtctctttcatagctctgtgctatcgctttcaacgctgaaaaaaggtttgagttctcgacaagggagccggttgtagccaatgtttccaccagcaatttgtggtcgcctgcctgcaaagcctccacgattgatttttgactattgagcgtcgcgtggtccgcgtcgagcggcgtttggggcgccagttctaccggggcggaggttttctcctcgccacgtcctgccagaacttcctggcgttttgcgatccggtcgagcgtggctgcgtaatccggcaaggccgggaatttgtcctggtagagctcgctgccggacttgcccagttggctggccaagatatccctgtcggccgtatccgcacgtgcggtgaagagttgcgtccgctcgtcggccttgctcagcaaggcgctgttggcgttgatgccatgggcggcgttgtgcaagagatagacttggtcaacacgtttgccatcgtcatgtcgggtgagttcataggcagagccgatgaccgtcgtcgggccttcgatcttgtagcccttaacgcccctatcgcccggctcgccggtgctggcctcgaaggtcttgctctgactgctgccatcgggtttgaaggtaacggatttgccgtcgaccttttcgatccggccagcttcgcccgcaacgagattcctatagctgctggtgacgctgagcctgtcgccgatcctgaaacgaatatccttgttgttgaacgccttgaaggtgacagggtcgccgctcaggcggccggatgcaaggccctgcttttcgatctccttggtcagtgcatccacatcaacgcgccggttagcatagagcatgcggaccttctcgggatcggccttgatgtctctttcgtaagcatccgccatcgctttcagggccgaccctgcatccgcgttctcgacaagggagccggttgcgaccaatgtttccacgagcttcttgtgatcaccaccctgcagggcctctacaacggatgtttgtgaaaaatgacgcccgttgcctgcagaggcggcgtcttgcacttcctggtcattcgaaggcatagttttttctcctgagtcttcggtcgatcggttttctgaaaagtttgagagggcgtccgttgatgacgattcccaatttggttcctgaacatcttgctggtgggctatggaaccaactcgggaaccggcagtactggtgtcgggatcgagccccgcataggtcggttgaattccgttcgcgagggatcctcccaagttcaatcgttcgactagggaggtgatatcttcgacagcctcggcagaactgattgagcgccgcgccatttttttgtgaggttcaatttcttccttcgtcgcgacgcgcttccttttctcgaccgcagtctccggttttgtatccgctgtgatccagggccgatgtcctcggcgggctgaggtgttagccggcaatcctggcccatagaattccggctgcatccgctcttcagtcgtgatgacggacgcctgggatgcctctaaatcaatggcgctttggtaaaggggtgcgctttccggcatatccacgtccgttgtggatggcccgtgaaactggttctctccaacggagctctcttgcgtggccagggatgaacgaggcgtcgttggaaagatttccatcctgtcggccggcctcagcaactgctcgttcgaaatcgacgagcgctcctctagggctatatgttcggacactgggaattgaatggagttattaggtacgatttgctgagtgagctttgcactgagaacttgaacgttgtttgccacgagaggagacgcaatgacgtcgagacgactgcgatgcctcgtcaagccgacataggtcagcttatctgaaagagcaccgtcacagaggaggatggcgtgatcaactgtggccccttggctcttgtgaattgtagcagcgtagccataggtaaatcctgcaaactcattatcggtccaagtgacagtgcgcgaagatccgtcaagccgtgcactgatacggaccgtcgcatttgtgccaatatcacgtccggaaggttctgcgctacgcagtccgactacagttgcaaaagtaccattccgaatatcagcctgcagacggctctcactgaataagattctgtctcctaaggcgagattgatcttttgctgaacccgcctcgacgacccatcatctattccaaattcagaatctcccccatctatcaggcttgaccacacgctcatttgctggtcttgcaatcccgatttatcgacgaacctctgatgaagagcgatattggcgcggttaacactcctgttggagtgtgccatgacaagacgatcatccaccgggtattgatcgcaaactctattcatctcctcgagcatacggtcgatgatttggtctgatgcccttacgtttgcgccgcgagggccagcagatacgaaacggacatggcccatttgttggagcgctgtcagatagttcccgacggcgctctgggcatcgtttcgtatgtcacgtccgagcttttcagtttgtaatcgccaccccgcatcgagttgtcgaagcggctggactaggtcatagcaaccggcttgctgcataatgatcggcagcaggtcaccgggtccaaccggaggcagctgacgatcatcccccacacagatgagtttcggcctttcggttggttggtaggaatcggcacttccgatcttgtcgattagctgcgcaatctcctgcgtcttgaccattgacatttcgtcgatgacgaaaatggtattttttccgacggtccgatctttggccttaaacgtcgtggcgacatcgcgaagccctttctgacgaagctcctgagcggcacggttggtgggtacgaaggcaaccaactttatttgctcggccgggagcgtatcctcgttgaaccggtccaccgcttcgttcagggctccaagtacacttgttttagcggaacccgccacgcccaccatagtggcagcgcgattaggcctggacaggtaatgcagtgctcctctaagttccggtgtgaaaatgcctctgtcggcgaccatatcaacaatggtccctggaacgccgaagctttgttccgcggacagattgctgacatgccgtataatattctcttccgcatttctgagctcggtagaggtatagagaggttggccatcgggcgattcgagctgggtaagcatgtcgcttgcgatgacctgctgaaaaagctggtcgatttcttgtgccggtcgcttgaagcgcgtgagcgcccgggtcgtcgaaatcttgagctggtcttgtccgaagaccgcagtgcggttggcggcgtggtttacgacccattccacaatattgctctggtccagtgggttaatggactggcggagttccgcctgcgatcgcgcgggcacagatgtgtcaacagcagccattccgggatcggacattataatgtcatcgactggcatgcttgccactcctactcttctcacttttcaatccgttgagtgatcattcacccgagtatgggcatttcggtaggtgctaattcaaaacgcaacaagtatccgctgcagcctcaaagccggttggagggagcatggtgatcatcaaaacccggaagcacaggctcgctgtgtcgcgcggctttcaagtattcttgacgaaggattgaattcattgacctcagatgaacaatcttttctacgataccatccattgcgagaactataactcggcatcaggcagttctctacatatcggcacagtcaaaatcgctacaaatgaaacttaggatgtttacatttaaaggcgacgagttgcagctttctgagcggtagcgtctggatctctggttccatggaacctgttctttccgacgcaagccttcatggcttcacgccgaaaccacatggcgcggccgcatctgagcggcgcgttgccggccgtgaagacgatttgttcgtcggcgcgcatgcgcaggacttcgtgcggctggatcagcggtcgcgccgcgagctgcttcgagcgtgttcgcgacgatcccctcgcctgagaactgcggctgacctgatcgatctcgaccgtggtcatgccgcagcgtttcgatatgtagtcggcggtctccggatcgttgatcgcggcgaacgagatccagctggcactctcgaaccacttgctcgaagcgtcgcggccgccataggtctcgcgcatctggccgatcgactgatagatcatcgtcagcgtgatcccgtatttccggccggcgtcgcgcgcggtctcgagaatccgcatatagccaagccgggcgacctcatcgaggagaaacagcgcacgcccctcaagctgcccgtcgcgattgtagatcgcattgagaagcgagccgatgacgacgcgcgccagacccgaatgggtctccaatgtcttgaggtcgatgttgatgaagacgtcggtgtttcccccggctatgtcgctggtcgagaatttccgtccagacacgagcgcggcatagttcggataggaaagccagtgtgtttccttgaccgcattggcatagacgccgctgaatgtttccggcgtcatgttgacgaaggcagcaacgttttccttcacgaaatccgagcccgaattgtcgtagatgtcctgcaggcgcttgcgcaatgtcggctccggctctgagagattcatgcgcacctgccgaagagtctgctccgtctcatccgtgtgaccggacaggcagacatcggcgatgagcgccgtgagcaactgcagcgccgatgcgcgaaagaagtcatcacggacgccgcgcgcgccaccgctgtcgctcatgatccatgacgcaacggaggcgatatcctcctccttcgttccgccgaaacggccgacccagtccaggacgttaaagccgatgtccggcttcttgggatcgaggacgaacacgtctcttcccgctccgccgcggtgcgcggagaccatgggtgcgacctcgttcgatggatcgagcacgatcagcgtgctgccccatttgagtgccgtcgggatcgtcaccgacgtcgtcttgaagccgccggaaccggcaaagacgatcccgtgcgacgagccgaaggagccgttgaagcacagcagaggcgacttgccaccggcgccccaggtttccgcgttgtcggctcgaaacgcttgtgctgcgacgttgtccttgtcgacccgatagcgctcgccgatgacgatgccaccagcatcggaaaacagcgtcgccgcttccgtcagcttcatccagtctgcttcgccgtgcagcgcccgcttgccgtgaatgcgtttcggtttggcgcttgcgaacgccgcattgccgatgagtgcaacgcggagtgcgaagcaggcacataggagcgccgcactcgcgccgatcgacgtcgccgggtcgagataagccaggatcgtcttgtcggccggcagcaccttcatgaacgcgccaaggcgcgtggtttcgcggatggccgcgatcaagatggtagcggtgcatccagtgagagcgccccaacctgcctgtttgatgttgatcgaaccggcactcgcgaacaggaacagaatgccgatcgcgctactcaccacatagggcaaggcgatgcccacccgcccccatgtcagtcgtgcggccccggtctttccgaagtcggaaagccattgctcgatcccggtcattccgataacgaccaggatcatcaacgccgctggccccgcgacgagcgcaatcctactcaccgtcattgccgaaggcctccaccccgatagcggtcagcctggaccgctcgccatcgtcggcgttgatgcgtcgggcaacatcgatcaaggctcccagcagcagcgcgcgcttctggtagcgcagtccggcctttacgatcaggccaccgagctcgatcttttcccgcgtgtccttcttgcgggcgtcgaatgtcatcgtcctcgccatgcgctcaagcctcgccagtgctgcccgcaccagcgccagatgagatcggcgcggtttgttgcgtgacggcgcctggccctcccctttcctttccgttcgaagcgcccttgcctccgcgaaaccgcttggcgacttcctcgaaagccgcctgaagctccccttcctccacctcgatgtcgccgagcccggccttgagcgcgatccggccgatccgctcggcttcccttgtctctgcgatcttgagctgttcctgcagcttggcgatttcgtcgcggattttcgaggatggcttcttcatgtccgatcgtctcctgggtgagaaagcttgtctttcgaacccagtttccggaacttgagtagcgaacgcactactgtgaatcctacaatcgccaagggcgatgctttgctggatgatcccggccgttccgaaggagcggcttccaagggcgcaattatacgtcgctggcgcgacgtgttgctgagagagcctggtgaggccgccgctccgaagaaccctttgatttcgttcgcaaccgggagagaactccgccgtggccgtccctcacttctccgtcagcgtcgtcgcccgtggctccggccgcagcgccgtcctgtcggccgcttaccggcactgcgccaagatggagtttgagcgggaagcccggacgatcgactacacgcgaaagcaggggctcctgcatgaggagttcgtgatccctgccgacgcgccggaatgggtgcgcagcatgatcgccgatcgctcggtcgccggcgcatccgaggccttctggaataaggtagaggcattcgagaagcggtccgacgcccaacttgccaaggatgtcaccattgccctgccgatcgagctgacggccgagcagaacatcgcgctcatgcgcgactttgtggagcggcatatcacgtcgaaaggcatggtcgccgactgggtctatcacgatgcacctggtaatccccatgtgcatctgatgacgacattgcgcccgctgacggaagacggtttcggttcgaagaaggttgcggtgctcggcccggacggcaagccgatccgcaacgatgccggcaagatcgtctatgacctctgggccggcagcaccgaggaattcaacgcgtttcgcgacggctggtttgcctgccagaacaaacatctggcgcttgccggcctcgatattcgcatcgatggccgttccttcgaaaagcagggtatcgacctcgagccaaccattcacctcggcgtcggcgccaaagccatcgagcgcaaggccgagcaatccgaccacaagtcggagacctcgactcccaaactcgaacgcatcgagcttcaggaggagcgccgcagcgagaacgcccgccggatacagcgccgtccggagatcgtgcttgaactaatcacgcgggagaagagcgtcttcgacgaacgcgatgttgcgaaggtgttgtatcgctacatcgacgatgtcgctctgtttcaaagtttgatggtccgcattctgcaaagtccggtagcgctccggctcgaacgcgagcggatcgattttgcgacaggtattcggacaccggcgaagtacaccacgcgcgagatgatccgcctggaagccgagatggccaaccgcgcgatctggctttcgggccgcgcctcccatggcgtccgtgaggcggtgctggaggcgacctttgcgcgccatgtccgtctgtcggatgagcagcggacggcgatcgaacatgtggcggacggtgaacggatcgccgccatcatcggccgcgccggcgccggcaagacgacgatgatgaaggctgcgcgcgaggcgtgggaagcggccggctatcgtgtcgtcggcggcgccttggcgggcaaggccgccgagggcctggagaaggaagcgggcatccaatcgcgcacgctgtcgtcgtgggagcttcgctggaatcagggtcgcaaccagctcgacgacaagaccatcatcgtgctcgacgaggccggcatggtgtcgtcgcggcagatggcgctgctcgtcgaaaccgtgaccagggccggcgctaaactcgtccttgtcggagatccggaacagcttcagccgatcgaggcgggtgccgccttccgcgcgattgctgaccggatcggctatgccgaactcgagacgatctatcgtcagcgccagcaatggatgcgcgacgcctcgctcgatcttgctcgcggcaatgtccgcaaggctgtcgatgcctacaccgcccatggccgaatgattggtttgagactgaaggacgaggcggtcgaaagcctgatcgcggcttgggaccgcgactacgacccttcgaagaccagcctgattctcgcacaccttcgacgcgacgttcggatgttgaacgagatggcgcgcgccaagctggtcgagcgcggcatcgtcgcaaatggatttgcgttcaagacagaggacggaacccgcatgttcgcggccggcgaccagatcgtgttcctcaagaacgagggcagccttggcgtcaagaacggcatgcttgcaaaggtgcttgaagccgctctcggccggatcgttgcggagattggcgaaggagagcaccgccgcaaggtcacgattgagcagcgcttctacaacaatctcgatcacggctatgcgacgacgatccacaagagccagggcgcgaccgtcgaccgagtgaaggtgctcgcttccctctcgttggaccggcatctgacctatgtggcgatgacccgccatcgtgaggatctcgccgtctactacggcagtcgctccttcgcgaaatccggcgacctcgtcccgatcctgtcgcgccgaaacgccaaggagacgaccctcgactacgagaaggcgtcgttctacggccaagcgctgcgcttcgccgatacgcgaggtctgcacctcatggatgtcgcccggacggtcgctcgcgatcgcctcgaatggaccatccgacagagctcgaggctggtcgatctcggcgttcgtctcgccgctattgcaacgaaacttggtttcgtcggcagcttcaaaaactccccaatccagaatccgatcaaggaggccaagcccatggtatcaggcatcaccaccttcccgaaatcgctcgagcaggctgtcgaggacaagctcgccgccgatcccggcctcaagaaacaatgggaggacgtctcgacccgcttccacctcgtctacgcgcagccggaagccgcattcaaagcgatcaatgtcgataccatgttgaaggaccagtcggtcgcgcagtccaccctggcaaggattgccggcgagccagagagctttggcgcgctgaagggcaagaccggtgttctcgccagccgtgccgataggcaggaccgggaaaaagccatcgccaatgtgccggcgctcgcccgaaatcttgaacgctaccttcgtgagcgggccgaggccgaattcaaacacgaaacggaggagcgcgcggtccggctcaaggtttcggtcgacatcccggcgctctccccatctgccaagcaaacgctcgaacgcgtgcgcgatgcgatcgatcggaacgatcttccggctggcctcgaatatgcccttgccgacaaaatggtgaaagcagaactcgaaggtttcgccaaggcggtttccgaacgtttcggggaacggaccttcctgcctctggctgcgaaagacactgatggcaagactttcgagaccgccacggcaggaatgacggccggccagaaggcggaggtccagtctgcgtggaactccatgcggacggtccagcaactggctgctcatgaacgaacgaccgaagcgctcaagcaggctgagacgctgcgacaaaccaagagccaagggctctcgctgaaatgaccggggccgtaacccgccggtcgatgaccacgcagcaacgacgagccattgtggttctgtcgatggcggctgtggccgccatcctgctggtggtgactgccgttgccggcggctaccgcatcaatctgacaccgagcgagccactcggcctgtggcgcattatcccgcttcatcgaccggcagcagtcggcgaccttctgttcatctgcccgccggaaacggcggcaatgcgggcagcgagggctcgcggctatctccgttctggttcctgcccgggcggcgtcgcaccgttgatcaagacagtgatcgccgtcgcaggacaacacgtcgaaatcggcgccagcgtaaacgtggaaggtcgggaagttccctcttccagtcttgcccaacgagatggaaagggacggccgttggcgccgtttatgagcggcaccataccgcctggatatgtctttctgcattccgcgttccccggctcctacgattcccgatacttcggtccggtgcctgcttcgggcattctcggtttggcgcaggaggtcctcacctatgcgccgtgattaccttcggccggcgctgctgatattcgcttcgatcgcgatcggcgtagtgggctggagcggccatctcttgcttctacccgtcgcgctggggtttccggttctgtggtcgatctcgcgaacgagattagtggcggcacttgtctccgccggatatttcctggccgcatcacgtggtttgccgcaaggcgtagcggcgttctattcgtcggacatctggccgggccttctgctctggctgtgcgcgtctttgagcttcgttgccgtgcatacggtcgtctggacgaagaacagcggagttcgtccgtttcgctatcttctggcggctatcatcatgtcgatcccgccgttcggcatcacgggctgggcgcatcctgtcaccgccgcgggtgttttgtttccgggattaggatggtggggccttggctttatgacagctggccttgcgggcctcgtaacccgcatttggccagccgtcgccatcaccttcgcaggcctttggctgtggtccgccgcatcgtggaccgagccggatctacccaatggctggcgtggtgtcgacctcaaattgggcgcttcgctcggtcgggatgccagtcttcaccgccagcgtgacctgatcgcaacggtgcggaatgcggccagcgatggcgcacgctttgtggtgttgccggaaactgcgctcggtttctggacgccgaccgtggcgcggctttggacgagcgcgtccggcgataccgatgggacggtcatcgccggcgcaacggtgctcgatgccaccggctacgacaatgtcctcgtcgcgatcgacaggaagggcggccgcatcctttatcgcgaacgtatgccggttcccggttcgatgtggcaaccttggcggtcctggttcggggaaagtgggggcgcaagggcggatttttttgcgaatccggtcgtcccgatcggtgccagccgggcagcgccgctgatctgctacgagcaactgatcgtttggccggtcctccagtccatgctccacgatccggattttgtcgttgccgtgggaaacggctggtggaccgaagggacgtcgatcgtcgccattcagcgcgccgctgcctccgcatgggcaaagctcttcgcaaaaccgctcgtcatcgccttcaccacctgactgcctaggagacaccatgctcgacgccgccctgataaaagaatgcgcagacccctccctcaagcccgcgatcgtcgagcagttcgtgatggcggcgggctcggatgatcccctctccgttaccgtcaaatcgggcggccgattgatactcgttccgaaagccgcgtcggctgaggaggcgatggcgatcgtgcggcaatatgctggtcaggccgtcgtccgcgtcggcctgacgcagtttcccgctggggttggagtcaaggaagcgactgatttgaaggccgatttggtcgacccgtgccaaaatcttcgcaaaggcacgacgatgttcgccaaggtcctcaggatcgttgcgaaatggtatggcaacccgacgagcaaagatgtctttccgcagatttttgaggatgcggtctacgcatggaagaccggtgagttcgagggcgtaagcgtgtttcaggcggaggacccaggaccaccggttggcgtttcgcagcaaagtagagagaagatccccgccgaggaggaggacgttgacgcgaaagcaagagaggaacagccaggggcggagcaggatgctgggcgcgcggggatacggatcgatctgtcgcgcattggtggtcagcaatagcgttgagttcaaggcggaatcttagtttgagcccaaggcataaaattagtgagactcaaacgcattaaactagtgtgagtcaaaagcgcgaaactagtgtgactcaaatgcaggatattagtgtttgtcaaaagcgtcaaattagtgcaacaacaatgcacggaagtagtggtcgactactcacacaccgtcgccggaggccaacatggcgaaacccaacgaactgctcgcggcatccctggctgaactgaggggagtgacgcagaacggcacccgatcggtggtgaaatccgaagagctcagccgtgtccaccgggaacgactacaggacaatgggttcctcgaagaaatcatgaagggctggctggcggtgaactcgcgaccgtcggccaacaacaggatcgatgcggcctggagtaccgtctactgggagttcgttgccagatacctggacgaccgtttcgcgggtgaatggcggctctccgcagaggcatccgtggctctatggtccgaaaaccattcaatcccggggcaggtcatcgtcagaagcccgaaggcgaacaaccagctcgtgaaactaccgagcaatacgtcgctctatctgctgcgctcaaaggaaaacgagccggccgagacgagagaacgattgagattgatgccgatggaggaggcgatttgcaatctctcgccggagtcgtggagaacgttagcgaccgatgtcatcgcggtcattggctcgatccgtggaacaagcacgctgctgcaatatcttctggacggcggccggagccacgttggcggtcgcattgcaggagccctgcgccatcttggccgcacaaaggacgcggacacgatcatcaagaccctggaatcggccggctacaacccgcacgaggacaatcctttcgacccggcagtcgatctggtcacgctggatgcgagacgaactcaggtgccgtccgctacccggatcaagagcctctgggcgaaaatggggaaagacgccctcaatcacatcggattcgagcaagtgcgtatcaacgaccgggacggatatatctcggacattgatgagcgctatgtggccgacgccctgaactcactttcgatcgagggttacgaggtgtcggaagagctgatccggagggtacaggacggtcaatggaaaccggacgaggacgcgcaggactacgagaccaagaacgcactcgccgccaagggatacagattggcctttgaggaggtgcgagatgacatcaggaagatccttgacggagcatctaccggcgaactgctcgaggcacggcaccaggattggttccgagccatgttcagcccttcggtaaccgcgggtatcatcaaggcacaccaactcgcgggttaccgatcacacaatgtgtatctgcggggatcctcgcatgtccccttaccgccgcatgcaatcgccgacgccatggacgcactgttcgagagcatttcggaggaatccgatgcgcgtgtgaaggcgatccttgccccgttcctgttcacctatatccatccatttccggacggaaacgggcgaacggcgcgctttatcatgaacgcgcttcttgccgagtgcggagcgccgtggacggttgttcccgtcgcgcgccgtgacgagtacatgaacgccttggaagaggcgagcgggcacgaaaacatcgcgccgctgacgagatttgtgtcggagcttgtcaacgcaccgccgccttccacagaagccgatgccagccacaaaaacgcccagagaaaaagggcataggtggccgcttcttgccgtgtctcttagaacggggtgacacccgagctaagagccgatgcgcacgtcgtttgatcttgtcacaagctccgcaggttcgacactcagcgcgtgcgcgatctggccgaggactgtcaccgtggcggacatttcggcgcgctcgattgcccctatgtgccgaacgctcaagcccgttcggtgcgcgagttcctcttgcgtcaattttttgacatgacgtattcgacgcagattgatcgccatgacctctttgagatccatggcgcgagcggagcctgaaacggaactattgttccaggaactatagttccgattcgacgtttctcgtgctattgctcgtcctgtctgtcgccaggaccactaagacggccaaaggaactatgagagacacatcaggcattatagcctagacgattgttgcgcagagcgatttcgtcttgagcgtggggttttcgaaaaaagggaggagaatgggtgagcgacgtgaactcgtctgagaccaacgacgaaacaaaaaaacgccgatcctgttttggttctatggagaagtcagaactggaggctctggcgatcgctgcgatcagagagcaccgccggcttattgttgccgacgaggttgtctacgaagagtggacccgctcgtcatccgatcctgcggtctcgagcgccgtactcgagaccttgcagcgagaatatatcgcgcgccaagagaagtccgcagcccagcaggaggagctctcggaaatcatcgatgcgctcggctatgtccccgacgttgctccagatgccgacgattgacgctatagcaggccgtggtccttggcgatcgcgacgaggtggggaacggtcgccgcttcaagtttctctcgcgccttatccaggtaatgctgcactgtccttggattgattcccgtcaggatcgcggtttcaggcgcggttttccctttcgccgcccactttagacacattgcctctctcggggaaagcaaccgcttcggcggaacaattgtggtcgcagcaagcatcttcagacggtaatggatcgccagaacggcgcggaccgctttttgaccatcctgaagctttgaaacatcagccgccggggctgaagatgcaaacgtcaacatcattgttgagccgaaactgccttcgactggtatagtcaccccactgcgaatgccgtgattgatcgcctggtcgcgaaactgcctgagttcggattttccacgagaaggccactcgtctgctgtccatggaaagatctccatgcgagtcttcgcttcccaaaccaccgggtcgatgcgggaatagtggctttcaagataaacgccctgccattcttccggataagagttgaatgtgcggatttccgatccctcagtctgcagatacgcaaaacgctcgaagccacatgcgtgcgcaaatgtcttcagagcgcttttgatcatacgttcatcgtgcgcggcttctgtcatatcgatgagagagcgaaggtcaccgtccactgacttttctcctactgcgcagctgcgagcctcccactcgccgcgcctgctggcgccgcgagttacaggtgccaccgttcggccagccggagccacacgggacatcgaaccttggctgcgaattctctgtcctcattcgtttccgatgaaaacacagttgcctcgtacgcgaagcatatccacggtcgttgcaactgataggtctactcacctctaccgagtattcaagtcctcacgatctaaaatatgattatttgaggaaagatttcaccgaggaatagctctgtcgccacgcggtaaaatagggcaatcccaaggttccgcgcggcttagcgaccgccataggtcgacgggaaaataatgtcctgatcgaccagaacattgaacttgtagcccggccggattcgaattgtcggttgaacgttcagattcttcgagatcgtctcttccgctacccggccgaatgactcggcaaaattccgccgtgctgcatccgaagccgtgtcctgtgtcgcgagcgtcgaactctcaggcatcgacatgtcgatacccgtcccgatgattgccaccagggctgcagaaccgaatgtcctccagagatggcggtcgaccttgtcctggaagcccccatatccttcagcgtccgtacccgccataccaccgatctgcagggtagacccattcggaaaaatgaggtccgtccagacgacgagtacccgttcctggccaaatgagaccttggaatcgtagcgaccgaacagctttgcgccctgcgggatgagaaggcgatagccggttgcgctgtcgtagacattctggctgacctgagcggtaatgcgccctggcaggtcggaattgaggccggtgatcaatgtcgccgggatgaccgaaccgcgcttcaattcattgggtgacatctgtggcacgacctggttcggcaggtaaccgagatccttgatgtcctgattgaaaaaatcctctttcgacgtctggccgttctgatcgacgttctgtcccatcaggccggatttcatggctgcggcgtaaaggtctgacgcgctgtttgccacggcatttgtcggctggcggcccgtgtcattggtggagtttgcggccttctcgacgtcggagatgtcaaccttgagcggtgaatcaagagctgtggaacgagcctggagacgcgccatccgttgccgttgcgcctcacgcatatattgctcatcctgctcccgtttcaggcgcgccttccactcttcttctgactcgagcctttgtcgacggtcttgttgctcctccgggcggcgctcgacgataggctcgtgcttttcctctttctccatgacgacgggtgtcggctgaaacacctcctgcttttctgggtcaccgataatgccatccgtgacaccccgcttcagctggtcgccgaaactggtcgcggggctgttggaagcaccctcgatgtcgccacgattgaaggaaagcccgcgtagcgacagaccaatcacaacgacgccgacgaacagtacgatgacgatgatggcgacgatgatcggcaggcggttaagccggcgcatgccctgctgatcgtcggcttggctcgacgtgcctagctggagcgactggaccattttaatctccgtcagttgcgctgcatgatcgaaaggggactggccggcacagcacccgccgctgtcggcgtgtaagcgcggccaagagcgatggaaggcgtcgagacccggaccagcacctgtccgtcgaagccctcgattgcataggcaagctcgaccggcttgacgtctttggcgactttgccgtcggtgacgaccgtgtagccccaccccttcagggcgccttcgagggcggtcgcgaactccgacgtgtccttctccattttgatcgtggtcgtagcaccggccgggccgatctgttcagccagacgacttgccatgtcgccggcgatggcgcttgcagccggtccggtgacggccacaggcgtggaactggtgttcagtgcgtcgtccgccgtttggcaaccggagagcagcgcgaccacgaagaaatatgcgaggagcctcagcatggttcagcctccgcgccggatggtgatcttctgctgccgccaaccgactccggaaaggaggatcgctttgtcgatcgcataatcgacggtcatcatgtcgttcttcatgcgataattgacgatgcggttttgaccgccggagacgacgaagagcaccggcgcgtcctgtccggagatcgatttcgggaactggatgtaggtcttcaccccgtccgaatagacccgcttcggtttccaagaagcaccgccgctgattgagtaggaaaagttcagtttgtccggcgcggtgcccggaatgccgcccgtttcgagacgggcgttgatgtcggcgagcttggtcgacacgtcttccggatattcgaaaccaatgcgcgccatgtactggctcggatgggacttgagctggatatgataggtgcgccgtgatgtggtcacgaccattgaggtaacgagcccaggttcggagggtttgacgatcaggtggatggcctgcccgcctgtcgctcccgacgtcgcaggttctaccttccagcgcacggtgtcgccgacgaggacgtctcggacgatctcgccaccctgaagttcgatgtcgcagacttgtagaggagagcagacgacggacggctgggtctcgccgaacagaaagatgacctttccgtccggaccagtcgtcaccagtcccggcgtgccgcgccactttctggaaagatttgtgccttttacctcgttgctcgtcatgctttgcgcctgcgcgcccgccgtagccaagagtcctgccatgcagccggcggctgcgatcattctcttttttttcattgaaagaatccctgcccttaaagctgtgccgtccagtcaaaatcccggacgtagaggccgatcggattgaggcggatcgtcgcctcatcctgtggcgcggtgagcgtcaccgttgcgatcccgcggaaacggcgcgtgccggtttccttgcccttgcggtcccgctcgtattccgtccagtcgatctgataggtctggttcgacagcgccacgatgttgttgacctcgatggcaaccgtggaagacttcgccttctcgaatggagaattgcctcgaaaccaggcgttgaccttctccgtcgacggatcggacgtgcgaagaagggcgtaggtgcggtcgatatattgcttctgcaccaccgcatccggcgtgatcgagcgaaagctcgtgacgaagttgccgagtgtggcccgcaccacgcggacatcggcatactcgatctgctcggggaaacctgccgtgaccgcggttccgagcttgtcgacctcaacgatgtaaggcacgagcctcacctgcgtgctcagatacatcgcgtagctgaagccgatgacggccatgaccagacctaggacaccaacaatgcgccatgcggcggcggccttcacataggagccgtagcgttcgctccactcctggcgggcggcaagatacgggttttccggggcgcggttcgctgccatttattcttcccttgtctcgattacggtttgtcgttgcgttcgggagcaggcttcggtccgctgtgaccaccccgctgctcatcaagtttggcgttcgctagcccaaggatcgaccccgcataggcgccgggagagccgattgccttttccttcgcggcggatccggctgcttgcgcgccggaattgaagctcgcgcccacgccgcgaagagcggctcctgcaactgatgaaccgccagctcgtgcggcttgcgcggctgcaaaccccgcgccggcggcgccggcggcgaggaagccagcaccggcggcaaaagacgccgcttgcccgccgtgccggattgcctccatgccaccggagaccgatgcgccctggacgacgccctggatgatgttcgggacgtacatggcgatgatgaagacgacgactgagataccggcgatggccaaggtggtgacgaactgatccgacgaggcagtcggagcttgggcaaggccaagcaggacgttcgatccgatcttggcgatcatcaccaaggccatgagcttcatgccgacgccgaaggcatagacgaggtatcgaacagcgaagtctttcgtgaaggacgaaccacccagcccgagcatgatcatgccggcgagcaagccgacatacatttcgaccataaccgacacgaaaatagctgcgaccagggagaaggagatgacaacgatgcccatggcgagaacggcggcaatcgcaagcgcattgtcttcgaacaccccgaactgtgcttgctccgacatctgcgaggcgacgcggatgccggcatcgaacacttcagcgggcgaagctgaaccaccgccggcgccaatctggaaaagactgtccaccaccgctcgcgcaaaggtcggaccttgggtcagaacgaatgcgaagaacccgatgaacatgatccgccgcaccagttcggcgaaccagctgtccaatgtggctgactggatcgccaaccagacggccgcaatgccgatctcgatcgttgcgagaatccagaatagagatttcgccgcctccatgatggtggtctcccaccccttcgcagcggaggagacctggttttccagttccgtgaggacctgcccctcctgcgcgaatgcgggaacagcataggcgaggaaaaagagacctgtaatcaggagcgaacgcgcaacacttaccttcaccatctcgggcgcatctcctggccttccttgatcggcggcaactccttgtcggagccgaagaatttttcccggacggcgcgctgctccccggtgaacgcaggtattcctatgtttcgggaattgacgatcagcactgtcgctgcagacgatgcagcggcgacagccaacagcaagccaatcaggacgcggcggctcaccatcgcggctccattttctggccttccggaacgctcttgacctcggcgttgaagaacttttcccgccgcgcctgcgccaggtccttgtcggtctgttccgtctgaagccaggttcccatcatcgtcatctgttgcgagacgagaccgcgaagcttctgcatttgcgagacttgctgagcggcgatctcgtggccgacctgcaaagccttcatctgcccgtccgccgtttcggacatcgatcgcagcgaggacatcgtatcttcctcgctatcgaactggtcggccgtgaggctcgcagccttcagcgagctggcgatggtgtcgcggttggtgttcgaccaagtctgataagtcgaggagaacgtcgcgttgtccggcaggttggttttgagatcggcgtagctctgaaagcgctgttgaaggacgtcgtcagcgttgcccatggaaaatgagatactctgaccctggtcgacgatactgcgcagctggttgaggtcgctttcaacctgcccccagacatggtcaggaagctgcgccgtgttttggagcatgttctcgtagatcttcagctggttctggatctgctccgcgagctggctgatctgggtcagttgattgtcgacctggatgcccgagcttttcatgaggtccacgagctgcgcgttgttggcgagctgcgtccattctgtcgcagcgccggtggctgtaccggcttgcaccgaacctgcacctccaatcgtgagagcggcggccgccaagcaggcgagccatctattcgaacctgagtagcgatgtggcatcgtgaacccctctcgtttcaagccagtggatcggccagtcgtggccatattcggatttcagtgcgcggatgcgtttgaggtcgtctttgcccgatgcgccgacaaagctcagcgcaaccggcccaagcgacatgttgaagagccgccgtccttctggcgtggcgacgtagtattcgcgcttcggcattgctgtagcgacgatctcgatctgccgctcgttgaagccaatgcgctcgtagaattcacgcgtcccagactcgcgcgcggcgccgttcggaaggcatatctttgtcgggcaggattcctttagtacgtcgataatgccggaccgctcggcatccgagatcgattgggtcgcaagaaccacagcgcaatttgccttgcgcagcaccttgagccactcgcgaatcttgtcacggaagacggggtggccgagcatcagccacgcctcgtcgagcacgatcagactgggggacccatccaagcgtttctcaatcctgcggaacaggtaggtcagcaccggcacgagattgcgttcgcccatattcatcagctgctcgatctcgaaagtctggaaggcgccgagcgtgagaccgtcctcttccgcatcgagcagctggcccattgggccatcgacggtgtagtgatgcagtgcgtccttgatctcgcgcagctgcacgccgctgacgaaatccgagagcgagcgacccgacgcactcgccatcagtctgatctgccgagagatggcgttacgatgatcgggggtgatagcgacgccctgcagaccgaccagcatctcgatccattccgtcgcccaagcccggtcggcgtcacttttgagttccgacaatgggcaaaaggccaacgccctcccctcttccgcattgtcgccgccgatctcatagtgatcgccgccggctgcgagcgtcaggggtagaagtgaactgcctttgtcaaaggtgaagatctgcgcatgttcgtaccggcgaaactgcgcggcgatcagagccagaagcgtcgacttgcctgaaccggttggaccgaagatcagcgtgtggccgacatcatcgacatgcaggttcagacggaacgcagtcgagccgctcgctacctgcatcaaaggcggggaattcggcggataaaaagggcatggcgcgacaggatttccggaccagaccgagttcagcggaatcaggtcggcgagattgctggtgttgatcagcggctcacggatgttgcaataccagttgcccggcaagctgccgagataggcgtcggtggcgttgagcgtttcgatccgcgcaccgaaaccttccgcctggatcagccgccggatcgcttcggccttctcctggagtgcttcgcgatcgccgtcgaatagcacgaccaccggtgtgtaatagccgtaggcaaccagctgcgacgaggcctgcgcgatcgcatcctcggtctcggccaccatggtcatcgcgtcctgatcgactgatcgactttgtgtctgaaatatctggtcgaagaagggcctgaccttctgctgccatttcttgcgtgtgcgttcgagcttctgtcgagcttcctcggcatcgagaaagatgaaacgtgacgaccaccgataggtgagcggcatcaggtcgagactgttcagaatgcccggccagctttcagacggcaggccgtcaatcgcgacgacgccgagaaaacggttctcgacctttggcgtcagtccgtgctcgagctcagcagtagcgatccaatcgaggtacatgggaacgtcgggaagccggatcggatggctttcgccagtgatgcagaaacgggcgaactggaggagctcgtcgtagcgagcaaccctctcccctcccctctcgagcgtctcgcgggtttccattcggcggatggaaagggtgttggcaaaatactgctcaagctctcgcaccgcgctcttgaacacaaagagcaccgtgtccgcgtaagatttcttccggctctcttcatcggaatagatatatctgctgagagaggttctcttggactcgagcggccggtaggtcaggatcagcgcatgcttgctctcgaagtgtccttgctcgcgtgcgaaatgtgagcgccgctccgcatcgattgcgcgggtcaccgggtcggggaagtggcaccgatcttctgacggataatcgaccgtcggaatgcggatcgcctcgacctggatcatccaaccgcttccaagccgcgacagaaccgcattgatctgcctcgacagttcgttgcgctccaggtcggtcgcgctctcggaatcaggccccgcgaagtaccatccggccatcaggcttccgtcctttaacagcagaacaccgttgtcgacgaggccagcataaggaacgagatcggcgaaggacgggccggcctcccggaagcgtttgagagctaccattgccgcctcctcagtaccgtcgccacggcgaagtggtcgccttgtagtaaggcttataggaaatgtgccggatatagacctgccgcatgagcgggtcggacttcgccatcatcctgagcagcccgacgatcacgatccagacagcgatgccgaagatcgccgaataagccgtaagcacgacgaagatcaggattacggctgcaaggccggtgatcagcaccagctcccggtcggcgcccatgagtaggttcgggcgcgaaagcgcgcgatggatgcggttatgccgcaggccggacagggactcagccatgatctccctcccctcctctattagagccaattgacgtgatctgctcgtcggtcaacccgaccgaagcgccggtcgcaccgaacaggccgacaatattggtggcgccgagcaggatgccggcgacaagtacgacgtacacaagtcgccgcgcgaaatcgttgagctcgccgccgaagatgagcatgccgccggcaatggccacggctgcaagcgcgatcgcacccgcgaccgggccggttatcgactcctgaatctgctgcagtggcccttcccatggaaggctgccgccggaactggcgagcgccggcgcgacagaggcaagaacgattggcgccgccacgagcgcggcggcgatgagggtatgcttacgcgacatggcgcgcctcctgttcttcggtgagctgatcggattcgatctcgtactgtccgttgatgaaccgctcgacttgaatgatgtcgcgaacaagccgcccgcgcggcgtccgctcgatcgaaatgaccagatcgacggcctctccgatcacctcgtgcatcggctgctggcttgcctcggccgtaagctgctcaagacggcgaagcgccgacatggcggtgttcgaatgaatggtcgccacgccgcccgggtggccggtgttccaggccttgagcaaggtcaaggccgcaccgtcgcggacttcgccaacgacgatccggtcgggacgcagccgcatggtgctcttcaagagccgcgccatgtcgatcgaatcgctggtatggaggagaacggcgttctcggccgcgcattggatttccgcggtatcctcaagaatgacgaggcggtcctccggcgtggatttgacgatctcgttgatgacggcgttcgcaagcgttgtcttgccagagcccgttcccccggaaatgatgatgttgagccttgcggaaatcgcgctgcgaatcgtcgacgcctggtactcgctcatgacgccggtgcgaacatagtcttcgagcggaatgagacgtgatgcccggcgccggatcgtgaaggcaggcttggcgacgacggggggcaacagtccctcgaaacggtgaccgccgatcggtagctcgccggagatgatcggctgttccgtgtccacttcggactgaagcgcatgcgccacggtcccgatcaccatctccgcggcagccgacgacatctcgccggcaggtgcaacgccgtgaccgaggcgttcgatgaacagctttccgtccggattgagcatgatctcaacgacactcgcgtcgtccagggcgacgcagagcagatcgccgagggcctcccgaagtttgcggacaagccgtgggtgagagcgaagctggttcacggatttctccttacgctgcctggctgagaggggtgagttcagagcggtaattggaaggacggagcctaaggaacgtctccgtattggcgggcagtgtgcccgccacggccatcgtcacgccgatcttcttcggctcgcccaaacgatgcagcggccatccgacgcggccaaggatgcgctcgaaccgaaggtcggtcaccgtgacaatctcggtgtacccagtcgcaatgcaccattcgatgatgcccgcgaacatggtcagcgttgcttcgtggatcgagccgtcccccctgccctccgcaagtgtcgtatcaacgcagaagcgagagctctcgaccatcgcggcatgaccattgagttgcccgtaggggagaagcgacgggaaaacgtccgccagcattgtcggaccaagtgtaggaaggagcctagcacaccctgccatttcgtcgcggttggaaattgcgaggatgtaggtcggcatcagagcgtcaaaagcatccgattctcggccatcggcaacatcgacctcccagcctagccggtcggcgaagacacgcgcgcgcagctgatgatggcattggaggagctgagcttcccgaacatttcgtggacttgagatcgccagaacccgcatggatttctccctcgtcgttggtcggcggggaaatcagcacggatctgaatcgaggggtagttgtaggatcctacaaggtagaatccgcctgagtcgcaagggtgacttcgcctatattggacgacggcgcgcagagggcgacctctttttgggttacgattgtaggattatcactaaaacaatacatgaacatattcaaatggcaatctctctaaggcattggaaataaatacaaataacagttgggtggagtttttcgacctgagggcgttaaccttctgttaacctaaaagctcttgcccaaacagcagaatcggcgctaattgccagcggcggaacttttccagtttcgcgaaaaatatcgccactggcaaggaatgggtttgagatggcgaagtctgtcctaaaagcagcgcctgtagttgtagggttgacggccttgatggagcgtcatgccgatgccctctcgagccaacttcaagcacatcatcttaaggttttcccgccgcattccgagaagggcattcgaacattcgggccatcggaggcgtccaagctgctcggcgttggcgagtcatatttacggcagaccgcgtctgagatgccagagttgaatgttagcatgagcccgggtggcaggcgaatgttctcaattgaagatatccatgtgattcggaagtatatggatcaggtcggccgcgggaaccggcgctacctgccacatcgtcgaggcggcgagcagcttcaggttatctctgtgatgaatttcaaaggtgggtcgggtaagaccaccaccgccgcgcatctggcgcagtacctcgctatgcgcggatatcgagtcttggccattgatctcgatcctcaagcgagcctttctgcactctttgggagccaaccggagacggacgttggcccgaacgaaacgctctacggcgctataaggtatgatgatgagcaggtggcaatcgaacgagtcgtccgagggacttacattcccgacctccacctgattcctggtaaccttgagctgatggagtttgaacacgatacgccacgcgcgctgatgaaccgcaaagagggcgacacgctcttttatggtcgcatcagccaagtaattgaagatatcgcggataactatgacgtcgtggtcatcgactgccctccccagcttgggtatctcacgctatccgcattgactgcggcgacgtccattcttgtcacggtccatccgcagatgctggatgtgatgtcgatgaaccagtttctggcaatgacatcgaaccttttgcgtgaaatcgagaatgctggcgccaagttcaagtttaattggatgcgctatctgataacccgtttcgaaccgagcgacggaccacagaaccaaatggtaggttatctgcggtcgatttttggcgaaaatgtcctcaattttccgatgcttaaaaccaccgcggtttcggacgctggcctgacaaaccagactctattcgaagtggagcgtggcctgttcacgcgctcgacctatgatcgagccttggaggcgatgaacgccgtcaacgacgagatcgaaacactgatcaaaaaagcatggggtaggcccacatgagccggaagcacatccttggcgtctcaactgacgcccctgagacgtcgcccgccgacaataggacggcaaagaaccgctccatgccgctcctcggcgtaacaaggaaggagcgcgatccggcaacgaagctcacagcgaacattggtaacgcactgcgagagcaaaacgatcgtcttagccgtgccgaagagatcgagcggcgtctcgctgaaggtcaggcagtgatagagttggatgcctcgtcaatagaaccgtctttcgtgcaggatcgtatgcgaggggacattgacgggctccttacttcgatccgggaacaaggacagcaagtcccaatccttgtgcgaccgcatccgagccagccgggccgatatcaggttgccttcggccaccgccggctacgcgccgtttcagaactcggacttccggtcagagcggtcgttcgcgaactgacggacgagcaagtggtcgtagcacagggtcaggaaaacaatgagcgcgaagatcttaccttcatcgaaaaggcgcgcttcgcacatcgcctgaacaggcagttttctcgagagattgtcatcgccgcgatgtcgatcgacaagagcaatttgtccaagatgcttctgctcgtcgacgccctcccctctgaactgaccgatgctattggtgccgctcctggtgttggacggccgagttggcaacaacttgccgagctgattgagaaagtttcttcaccggccgacgtggctaaatatgctatgtcggaggaagttcaagcgctgccatcggcagaacgattcaaggcggtgatcgctagtctgaagcccagtcgggttgcgcgtggacttcccgaggtcatggccaccccagacggcaccagaattgcacaggtgacgcagagcaaggccaaactggaaatcacgattgacaggaaggcgacgcccgattttgcgaccttcgtgctcgatcatgtgccagcgctgtatcaagcgtaccacgctgagaaccaacggaaacggggagagtaaaccgcaaaagaaaagagccccctcaacgtcgccgtcgcggaagcccttctgtctctctagcgcgaacagaatcgcatttcctcgaatcctcgtcaagagtttttagcgccgttttggtgagctgatttcctttgcctgctgaaaggtgaaagatgatgcagacaggaagtgtaacgacgccattcgggcggcggccaatgacgcttgcgcttgtgcggcgccagacggcgctggccgatatcaaacaaggcaagacagcggacaagtggaaggtctttagagacgcgtccgcggccatggaactacttggaatccagtccaacagtcttgccgtccttgatgcgctattgagctttcacccggaaacggagttgcgtcaggaggcacagctgatcgtcttcccgtcgaatgctcagcttgcccttcgggcgcatgggatggctggcgcgactttgcgtaggcacatcgccatgctcgtggagtcaggcttgatcgtccggaaggatagcgccaacggaaagcgttacgctcgtaaggatggcgctggtcagatcgagcgcgcgtttggcttcgatttgtctccgcttctcgcgcggtccgaagagctagcgatgatggcacagcaggtgatggccgatcgagcagcattcaggatggccaaagaaagtctgacgatttgccgacgggacgttcggaagctaattacggcagctatggaagagggagcggagggcgactggcaagctgtcgaggaagtctatgtggaacttgtgggtagaattccacgcgccccgacgcttgctgatgtagagtcaattctcgaagagatgtggatgctccaggaagagataatcaaccggttggaaattagagacaattcagaaaataatagcaccaatgctgcccagagcgagcagcacatacagaattcaaaacccgaatccgttaatgaacttgaacctcgctctgaaaaggagcagggcgctaagccgagtgaaatagaccgggcaaggagcgagccgataaaagcgttccccctcgggatgatcctgaaagcatgcccgaccattggcaattatgggccgagcggtgcggttgctagctggcgtgacctcatgtcggctgcggtggtggttcggtctatgctgggggtcagcccgtcggcttaccaagacgcgtgtgaggcaatgggaccggagaatgcggcagcagcgatggcgtgcattttggagcgagcgaacttcatcaattcgcccgggggctatctccgagatctgacacggcggagcgagctcgggaagttttcacttggcccgatgataatggcgctcttgaaggctagcgggcaggggacgttgcggtttggctagaattagcgagtatggagcaggatggtctgtggtcagctgaccacagacctaataggttgaaaacatgagcgttttttggatgatcgacagaccatccgattcccggagtaccaagcgtgctctgatgggagcgataacattactcaacaagcacgaaggccccatgccgatcgttgatcgtgaaggagagcctgctctacatgcggcggtattttgccggccgaggcatgtagtcgcggagcactgcctatttactgccctaggcacaaacgttgactcttggatcgagctggcagacaaagcaataacccacacagaggacgattaatggctgacgaagagatccagaatccgccggacggtactgctgctgccgaagttgagccggctgctcctagaggtagaagagcaaagaaagcaccagccgaaacagcccgcacgggatcgttcaaatccgtgaagccgaaaacccgcggcctcagcaaccgagaaaaactggagaagatcggtcaaatcgaagctcaggtcgctggcggcgcaaccttgaaggacgccgttaagatcgtgggtatttccgttcagacctattatcaatggaagagagctgcggttcaacctgtctcacagaatccggccgtgtctgtttcagttgacgatgaactcggcgagttcatccaactcgaggaggaaaatcggcggctcagaaagcttctctctgaaaaattgcgcgcagaaaacgcggacttacgcaaaagacttggaatcaactagcggcctttgggggtccctcgctaaatcaacttgacgcgcatctctcaatgaatgaatgccttggaaaatttccgcgcattctgatcgttgcgctatcaagcaatcccaatcttctggcatatgaaaaaaccacgacccaaattcgtcgtcgaatataagacgaacaggcgacaagccaaggcccgaccaacgtcaatctggggcaatctgggtttgcaggcggtgggccgtgcggtcgcggccgacggagtcgtgccgaagagtagtctgccgcaagtccgttccgtcctggagaaggttgtcgctgcagatccagacgtggctgccatctttgctcaggttgagattaagggccttccggctccccccaatacatcatcaccgaacgagggtcacatcgagccggtagttattgagggcaaggtgtttgccgcgcctttcgtgcaggaggagcgcaccttggccccgccgcaggctccgagatctcgagcgaaaccgcggacaaaaaggcggtccccggacaccacagaacgtcctgcagtccaaggttaccgtcgtggtccctcggtgctgccaggttttgaggaagagcttgccgctatcgaggcggaaaaccgtcgtctgaagcgcctcttgatcgtgaagctccgtgaggagaacgacaggcttaagttcgcgcttcgacgatttgggggcgcctgagcacgatgctggcccacttgcttcagcgggcaaacaacatggagtggagatctaatgatcgcggcgcttgaacatcgctaggggtcttcggcgccgctgaaccgtgctccattttgcactcggagacacagcctcccaaaaacctggcgccgctcgttggtgaactcctcaacatcgagcggatcaagggaaactggaatgacatccttcgacccgtcacggcgatccgctctggccaggtccaacctacggccatgcccgcaaagccaacggcatttccacgtcaagcacattgacccactcggctgacggtacatcagctggcgagctcatccggacccagacgaactgcgttgatctcaggccgttgcggcagaaaacctccatcctcgcagccgatccaacactttcctgtggtaatgcctatttcagatgaaacagccttttttaaacttggcgcgtcattctgatattatggccacacctctacgatctagggagtgcgagaagtggaaagaaatgaagaacccgatttgcacacacatacctcgatgcggaataaaaatgcatcatcgcttggtgaggccctggatgacgatgcgatcgccaacatcgcgcatcacattgttacagacgacccggtggaaacgtcaaaaaacttcacaaaacttaagctgattaacaaatcagtgaaacagggtttcgaacgcagtgcgtacggaaaattccatcgacgcattagccggcttggtattgctagtaaggcgctatatgacaacgctgtgccgaaggaaggattcgtagaacatcctgaatatgctccagctctgcaaagggattatgcgttggcaggagagcgaattgaggcggttggtggaactttcaggttgcaaacacctcagcggaaatcggctcttgtagatcatatcttgagtatgcccgaaggtttcgatcaagctcatgcccttgagtctatagcccctcatgttggcgatctaagcgcggaagatcgccatcgtgttgtgaacaaaatgctcgagcactttgccaccccgtttcaagaaggggggctgccaaccgacgaaaatttttgtggaacgtacgctttgtccaaggcgtttcctcatatggaagacagcctaaaagcaaagatgctggatgtggtgttagagcatcctcacttagccaacctccattggacgcagagagaactagttgaagggtggcatcaagaccgtgaagctgagaagtcagcctggcgttccaatcaaaagccaattgtcgaggggcgacttgcagacctcgaacgatcgatccacagtgatatcgaggtgacaaacaggagtgattttgcgaggatgcgttcagccaggcccttgcaacaagctataagcgatacgttcgatcttgcgcgtgaggagctcaaaagccgccctcgtgaagggcggggtcgataattacatctattggtctttctgccgaacctctatgaaatccgcacgtcaaatgtggcttttacttcccgatttcaattgaagcgctaagctgaaaatcccgtccccatttctgacctaacggtttcatcaccggggcagggagcggcgcttaaaacggtgacggccaccaccaaaggacatgttcgctcacgcggtgcctccgtgcttctttgcaagagcctgcttcaggctgatgatctccttcagtgcgttggtgtgaatccgctccaggcgtttcagttcgctctccaaataggcgttgcgcttatccagcctcgtccgatcttcttccaagctctccattttcactagcgcgttatggtaattcaaccgtaactcctcaaaaaaagcacgttcggcgacgaaatgggtttcggaatcgagttcaggtatgtcgccgacatgcacgacgcgaaccgccttgccggcagcggcgagccgggcgcggtaagcgcgttgaatttccgcttgggtcagcgcgtttggcttgcggggccgcgaggaaatttgggagtaaccataacggttatttatcataacgcgttatcactggatagcatcggcgcaggcggatggcgcgcttcgccgggtcgaaatcaatatttccagatcgagatggattgaagacctgaagggccctcagagcccagacgccttggttaggttggtgcggaaccgatcccgccgccgctggtatttgcgcgtcatctcggccgaggcgtggcctagttgtttctgaacgtaacgctcctcaatgtcggccgaggaggcaagaccggcgcgcagcgagtgccctgagaacagcagcgcccgttccccttctggaagatcggaacggacgccggcggcgagtgcggtctgcttgaccaggcgggcgacatgcttgtcggagagccgctcgacgtccacggtcttgttgtccttgaagatgcgccggaacaggggaccgcgcgcgatcctgccgaagcggatccagctctcgagggcgaccaccgggcaggtctggtcggaggcgccgcggccgacctcgacctcgcgccatccagtcttgccgcgtagcgtcagcaggacgccgtggtcgggaaaaatctcgatccagccatggccatcgctgttgtcgtcgcggacgatgtcgaggccgacgatctcggagcgccgcaggccgccggcgaagcccagaagcaggatcgcccgatcgcgcagccccctgagatcatgcccgagcgtgttgaccatcaccttgatgtcgtcgccgaggacggcctccttcttccgtggcggcgttccgtgcttgcggcgaatgccggcaagcaccgtcgcaatatgccggtcggagcgatccatcgatgcgccgcgctgggtaaagttccaggcgaggccggccagacgccgctcgatcgtcgcgaccgagagggcgggggcattgcgctttgaatcgccggaggcacaggcgccgatatagaggccgatcacctggctggacggcggcagggggtcgaagccttccaggcgacaccaggcagtaaaatgccgccagtccttggcgtaggcgttgcgggtgttgtcggatctggcggcgttggcgtaggctgtcgccgtctcgacgagggcttccagccgcgccggtcgcggtgaagtgccggtttccactacgagggcgacgccggcgggaaggtcgccgtcggtagagccgtcgattttgagcgtactagccgggggattttgcatggttcgggaacctatcagaatacgtccgataaggcaacattatcggacataataccgcagagacgggcggtgcggtttatggcaaaatctgtagccacaaccgcgcgtatgacttaccatctatcgcatggattcgctcgcacctcctaccgccaacacctccacttggtcgccccgcttgccaagttggacgcggccgcgaactcaggacatgacggaatccgacgccgccttcgccgccggtatcgccatgaaatcgctcgacgatctgctcgacgctgaccctccgtggcttggctgctggcgggaccgccttgctctcaagtcggccgccgtggctgccaggatggtcggccgcaacgaggatgagaatgctattcgcgacgcggtttcgctgaccgccgcggaagatgatcccgggccggccggcaagctatttttggcgatacgattgctgatgcgccaatccgggacaatcactacgccattggttaaggagctctgcgcgctgctggggatccgctcggacaatgctcttgcctcagtcccggatctcgtcgataccgcgatacagtccgggcgcgcggcacccctcgcgctggccgatttgatatcggctatcacgaccgctcgcccggatgctgaggtgttggccgtggggctggcagacgttgtgctctcgcgaaaacttagctggccgaaaccggtaccgttgctgttacccgaacgctacggcccagcttttcggacgatcggcggcagaggccgcgtccgaccggacgagccggcttatccaaaagcgatctgcctggcgctggtcgatcgcgtggacgcggcccttcgctccgccgtcgagatcgatcgacgtgcagcacggctactgaccgtggcgccgaagcttcgcaccaagggtgcggagcccgtcatccagagattgctaaccgaagacgccgtgccggcgtcggtgcccggcagcaacttatcccgttgggcggcgaaccggctgttcgagcggctcgaaaatctcgaggcggtgcgcgaactctccggccgctccaccttccggatatttgggttgtgacgatggcgggagcgagcggggccaagaccaccggcaagcgtcaggcgaaagagcgacacgacgtgttcttcgatcgggagctggaagacctgccgcccgagttgcgctggcgggaatggatgatgcgggtcgaggcggtgatctttgcctcggccgagccggtcagccgcgagacgctggcgcgggtcgtgggaaaaaactgcagcatcgatttgctgatcgacgatctcatcgaggagttgcgcgatcggccgtacgaactggtgtcggtcgccggtggctggcagcatcgcacccggccgcggttcgccgaaacgatccgggcttcgtcggcaccgacgcggggaggggcggcggcgctgtcggagtttgaggcgatggtgctgatggcggtgggctatttccagccgattacgcgtggtgagctgtcgaaaatcttcggcaaggaggtcagccgcgacaccatcggtagtttgcgtggtgcgggtttcatcggctctgggccgcgcagcccgacgtcaggggcgccttataccgttgtgacgaccccgcatttcttgtctgcgttcggcatggagacattgcgcgaccttccgaacatcgaggcgcttgaagacgccggtctgctgagcaggcaacttgtgcaacgtggcattgacgccgcacaaaccggcggttcccaggaggacgaggactcgtcctttattgggtgaggtctgctgactccgaccgctttgccatcagcataggactgaggatcatggtagtcgacgctaatgcaatcgagagaccgagctacaccagtacagtatcggcatagtggtcttcaatgctggcaatggcgggctcgaaccgcagtgcagcggcatcgagagcatttcccacatcggaggtgtcgacctctattccgggaatgcttgtcgggatcgttcaccaagcttcaggtctgacatggtctcgtcctttcggttgacgatcgaaaagttttgcagcgcacagaacttccgttgcaacctcacgctcgccagaaatcgatcggtttcacgagaccacctctcacttcaggtcgagcgcctgtttgaggtcgttgatccgtttcgacgcatcagccttcgtcaggtcctcggcatagccgtcgcgatgatgcgcctggtccaccagcgtcttcagttaggaccattgcgcgcggtcatcgccccgtcgccgctgacccagtcttccgtgatcttcggactcggtctgcaaattgttcttgaccgcacgctagctcccttgctgattctggatagcgcggagcctttcgtcggtcgtctcttctcctccgcgggacatacctatatggcttcgtgacagaaaattgattgacaatcacagaggggacggttgacgcgaatcgcaattaagaacaaataaagaaccttggattagcgtgcgcgagcagtctgcgaacgcacactcaatctggggaccggctcgaaaagggaatgtccggcgcaagctcaatatgctacgtcgagataaccgccaatatcatggctcgatcgtttgctctaaggtaaacagatcaatgacagccacgggaataaggagattttcttgctcaagcgtactgacgaaactccatctccttcacacgacttcctcgacttcaccgccggccgaaaattcaagaccatcatggccgacccgccgtggcagttcatcaatcgcactggtaaggttgcaccggagcacaagcgactttccaggtatggaacgatggcgctccctgaaataatggcgctgcctgttgccgaagcctgcgcctcgaccgctcatttatatttatgggttccgaacgcacttctccccgagggcctcgaagtgatgagagcgtggggcttccaatacaaaagcaatctggtctggcacaagatcaggaaggacggaggctcggacggtcgtggcgttggtttctatttccgcaacgtcactgaattgatcctgttcggtgtccgtggcaagaacgcacgtactcttgatccgggccgatcacaggtgaactaccttagctcacgcaagcgcgagcattcgcgcaagccggacgagcagtatccgcttatcgaagcctgctcaccgggaccgtaccttgaaatgttcggccgcggtgttcgcaaggggtggacgacctggggtaatcaagccgatgagacttacgaaccggactggaagacatacggattcaactcagccaccgaccgtatggccgcagaataatcagtctgtagcgtcggcaattccttcagcgaccagattttcgtcctcgcgctcgatgtcttcgagttcgaggttctcgtcaaatgtgacaatggctgaaggcaggccgaccaaaacgagtgggcatggattgcccacgccgcggtgaactctgtcctcgagcttcgaccaatgggtcgtggcctgcccgtatttgtccgacacgaattgaccagcccatgcttcctcgtacgactggccgacacgcattcgtcggtcgacctcccggttctgccgggccgtgcggctcattccgaatgccgtgacggcgtcatgtgagttcaggcctcgctcggtggcgaagcgctgcaccatagccctcagttcatcctgcatagtcgttccgcgggtgatgatgaccccgactgaaatagccccatcggcatgaagacgcttaaagttttcaagatcgcgatcgaagaacggatccttgttattccattcaatctcggcagctaccacgcccgggccgaaagcttttacgtgatcaatctcgtgtgagatggcctctcgcgccacgccattgattcgcttctcgacggtgaagttcatcttagtccatccacgctgcgcaagcgcgcggcgaagccgctgcgttccctgagattccccaccgccggaaccaacaatttcttcaataggaatcgatagcgcaccgatggtctcctccagctcggccaccgcgtctggaaagtcgacactgaggattgccctcgcgtggctatgtatgtcgacttgaaagccgcgttcgatgagagcgtcaaacatgtaatccgccggattgattcgatggccgatattaccatgccgagaaatcccggcgatcgctcacgcggcctcgggcgggcaaatgagcgacacattcgggaagtaggtctgatatctcgcgacatcgtttgtcataataggggctgcctcgacttcagcgattgcccctataaagaaatccggcagggttccggtcctctcgcccttgtttttccggtactgctgataggctcgcccagctcggaataaggcgtcgtcgtttgtcggataacgctcgagtcccagctcggcaatgaatgcgttcaccttcgaaacgtcctccatcgaaacgcttacttcgctatatacgatgtcggaaacgatcgctggaccttccttcttgcgggcctcgagctccttcacggcccaatcgtgtattgcctccgactttttcaggattgcaatcaaaatgttggtatcaataaaggtggtcattcacccctcgtcagtttcatcaattcttcggccgacatgttcgggatcacacctgcttcctccaatttttctaatgccgcgcgggtcttccgccgcacaaactcgttaagatcgaactcatcaagatcgtctgggccgatatcatcgaaacccgcgtaccgagccaacattgcgcacactgctggtatactcttcagaatacgaggattcgtgatgtggactgcgccgcgaggacgggggtcattcgcggcgaagttctggacgtcggggagaagtgttttggttctctcctttgtagcgtcgtcggaaaaccgctcacgcgctccacaggcgtcgtacagtgctaccagatgtttgatcgccaaatccttctccagtgacctccgacctgttagttcgatgaacccaactcgcgtcaacagagatgtgtactgcgagggcgacgtctcggtcttgtcgatccttcggttttcgataatacgatctagggcaaggaacaggcagtctacccaccagcgctcaatcctgggagttgcgaactcctttatgcggccgccctgtagcaagtagttatagttcgtcgagagttttctgctcgtctcggcgacgtaacgccggtcgctctcgacaaagcgctggatgtcatcggcgcttataccccgagtatcccagttcatggttcgtgctatccgctcacggatataggcgttagcccaaagtgctggacgccgctggccctgctgctgcctggtccattttccagccatcgaaagattgaaggcgaaaagcgcaagtttatcaaaccgtgcgctgtgtttccagtttacggcctgaaaaacaagctcgtcggcgaccagataatcggaaccacgctcctgtctgttgaagaggaagaaattgattggaatgtaatcaggtctgccaagtggtctgacccgttgccggaacatctcccgcggcacgtcctccatcttcccatcgaatcccagctcgatgagctcatgtaactccgacaaccctgccgagggttgcccccagctgaagtttttggtgaagcttcctggcctccagatttcggcttcgtcggccatcgctgtccatttcgagattcgggtgtgattctatccaggaaaggtaaagattcaactggaaatagatggccccggttgctctacggagttgctgccaacccaaattttttaatacggcaacacgccggcgacgagccgacatattcgataagccactaccagaagccgtgattttatcgtagaccaatctcgatgttgagggctaatttctcagtgagaacctatgaatagaatcggttactggaacgcgatagttttcgcgggtccccaggcatggggctttgccttgcttgagatatttgtcgtggcgacggtctcactaattcctctcttgggggcggcactcagagacgttcttcctgctacttctaatatttatctcggtgacgcttttcaaaaagcatttctgagcggacaattaatcttttatgcgattgggcttatcgcgactattgtctggcaatcaaataaagattttagctcgttttttccgtggcgctcgtttttcaacatcttcagtctgattggcattgtaatttgctctctcgtgatcggatatgatcccacattaacaagtataagtccgcctttcctcgccaggtgctcactcatcctgttttttctttctcttgcggcatatactctcatggctgtgatagcccaggttcatgtaaatgttggccagtcacttgctgaagacgactccgcattggccgacgaagtgcgccgcagccgggggattcactgatggtaacggaaagcccacgcagcgtcactatttccgcgttacgcatccggcagccgataggcgacatctatgtcggaagtattccagccaagacgctcgttgatatcactgacttcgacattcgacagcttgtatctgaacgcggtatcgactcttatctgggcattcagcgcgatttagacccaaagcgcgtaagggaaatagcccagtacgttaagggtacagacgctacctttcccacggccgtcgttctggccgtgcctgaaaagtgcgtcacaatcgaatccccttgttcggcagatgatcgtttcgtgcggatgactctttccaactatcctcagggagaagatgacccagaggaggcggtgtattatcggcatatcgcgcgagtaatcgacggacagcatcgcatacgtggtttggaagggtatgccggcacagacttcgatgtgaatgtgtctatattcatcgacgcagacatcgctgaccaagcaagtatcttcgcaacggtaaacttagctcagacgaaggttagcaaaagcctcgtttacgacctgtttgaactcagcaaaagcagaagtccggaaaagacctgtcacagcgtcgttgttgcactcgaatcgaccaaaggcagtcccctttatcgtaagatcaagcgtttagggaaagcgactccagggaggtacagcgagaccctgtcacaagccacagccgtggcgggtgtgcttcagtatatttgcaaagataaaatccagattatccaggatcgccagatcgggcgaagaggtggaacttttccgcccgcgcagccggtagacgccaacaaattagtgctgcggccgttttttactgaagggcgcgatgctgacttgaccaaccttatctggaattttttcgaggccgtccaggagcggtggcctgacgcgtgggatgtaaacgctaacggaaatatgcttaaccgaactaatggcttcgatgggttgatgcgttactttcgacatgcctatcgatatatttccagcccagggaaggtggccacggcaggccaatttaaggcgcttcttgataaatcggaattggaggatgacgacttcaatccgcagaacttcattcctggttcgtcgggggcttcggcgttagcgcgtcgtctcatcgacgagacaggcgtttcttcgacctaagaaaggcccgtcacatgagcgacgaagatgacattccgcaggggctcaacagagagcagtgggccggaattctagtcgagttaaacaaacgcgaagcggccaaccagaagcggtccgaaacaatgaaggcgaaagcggctgccaagaaagccgagcggttggcgctcccgcctgttgatttggacgaggcgtggagacgacacgccgacacttgccctcatcccgcatactcccaggctgcaacgggatggtttcgtgaaaacaaaagcttcgattttgacggaactgcttggcgtcgagaacgaagatttcaaaccagcaattctggtaaaagcaaaaggctgcggagtatcacatatcatggtgccgatgggcgtgtggtgacctcttacgatgaaggaccaaatcgtcgcaacgattccgatagggactgggggctaccggatcaagttgttcgctctgccttcgctgaaattagccccaacagcgatggctgatacgggcacaatcgagaaccaaccgaaggcgtctccatgaatggtcttgatccgcgggcatatctggctgacgtgctcgatcgcatccatgatcacaagatcaatcggttagacgaattgcttccgtggaactgctcggcgatctccacaatttgacgcaaaggcagcctgatggcgacagtcacctacgtccgtactatcaattttgttgccgagattctcgaagaggacccggagcttcttcaggcaatcgtctccagcgatgataatctgagctacgggagcatcatctccgtgtactccggagacgacgaatccgtgaccgcactgacagacgacggcatggacgaattggagcaaatgctcaaagacgcccgccgctcaccccaggaatggaacgacttcctcgacagttttgttgacgacgagctgctcgtcgctcgcatcaaagcaaaatctccgcggtagcaatgaggcggttactcagcattttgccgggcataggtctccccgggtggactgccaaggtgtatttgatattgaagtcgcgtggcgtctgaccgatgagtgcgttgaaatgctcagcgaccatcgcccgtgcacgggcagggtcggttctgcgagcatctttaattttctcataattttctcgaaatgtgattggtcgagacggttgccaagccggatgcccatgaacgatgggaagatttcgcccagactccgcccaacttcgggcttgtgggattataggcgatatagttttgaggagctcggggcgcttgattgccttggacatatgtcttttagggaaggcatgcgcaaccgcgatgtcggatttggtctcttgggtcagccactaggtgcgataaccatagggacttgtgatctccttctcctctatccgttcacacaaaagcagatcgcccgaaaatgtaaattttggtcgcattacagatgaaacgagattcaaatatgtaggaacatccttttgttgttacgttgagccgaaggcatattatttaaagctaaggctttggattttatatcttttgcgtctttcctctggcatctcttcgctgaaagtgtgttataatgattgcgagcagctcttccaatgtttccgggaataaccagcagtttcggaatgttgcgctgtcaaaagaactcgatcccgacaatgttcctatcagcaggcttgattctgaaggccataatatatttgctgaatggcgacctaagcgtccgttccttagaagagaggacggtgtccttctagttctccgcgcggatcatatctttcagttgggcaacgatccacgtaccaggcagatagaagcagaactcatgttaaatcgaggcgtcgaaagtggcgccgtcttcgactttatccgctatagcatgctcttttcgaatggcgaggcgcatgcgaaacggcgctcagcctttactaagaccttcgcattccggatgattgaggcgctgcggccggagatcacgaagttaacggagcgtttgtgggacgatctactgaaagttgacgattttgactttgctgaaatgtacgcgtcgaaattacctgcgctaacaattgccagcgtacttggtctgccgtcaacggacgcacctttcttcacgcgtcttgtttacaaggtttcgcgctgcttgagtccctcatggcgagaagaggagtttgcagagattgaagcttcggccatagagctccaggattatgtccgggcaacggtaacggatagaagccgtcgcataagcgatgacttcctctcgtgctacttaaaagcggtgcgagaagaaggagcgctttcgcccatcgaggagatcatgcaattggtgcttctcatacttgccggaagcgatacaactcgtaccgcgatggtgatgctgccggctcttttgctgcaagatcctgttgtttggtcctccttatgtcgcgatcaatccggtgttgcggccgcagtggaggaggggcttcgtttcgagccaccagttgggtctttcccgcgcttggcgctcgaagagattgatctggatggctacgtattgccaaagggaagtctcttagccctaagtatcatgtccggcctgcgggatgagaagcactacgagcattctcagctttttgacgtaacgcgcaaacaaatgcgttggcacctgggatttggtgcaggcgcgcatcggtgcctcggcgaggctctggcgcgcgttgaactgcaagaaggacttagaacacttttgcgccgcgcaccgaaccttggggtgacaggcgactggccacggatgataggccacgggggtatacggcgcgccacaggaatggcagtcaagccatccgtcgatcggtgaactaatcggttcctctggttcgacggagacaatgtcgtgcatcagattcaaggttaaacgaatcgggagggttcccaatgcaattggcgccagtagatcgcgtaaccactatcgacgacctgacactcgatccctattcgatctatcgtcgaatgcgcgcgcagaccccggttgtgcgcgtcgccgcggtcaagcggacgtttctgaccaaggcttccgacacgaagatggtgaaggatgagcccgggcgcttcagttcggatgaccccctcacgccgatgaagcaggccttccaggcccaaactctaatgcgcaaggacggggcggaacacatccgcgagagaatggccatggccaaggcttttgctcccaaaacaatcgcggagcattgggatgcgatctatcgggacatcgtaagcgagtatcttgatcgcctcccccgcgggggcacagtggatctgtttgcggagatctgcgggccggtggctgcccgcattctcgctcatatccttggaatttgcgaagcctccgacgcagaaatgatacgttggtcgcagcggctaattgaaggggcgggcaacttcggatggcggcctcagcctttcgagcggtcggaccaagccaatgcggagatgaaccggctcttcgacaacttgatcgaaaagcatcaggcggaaccgaacccctcggctttcgcaatcatggtgaacgcgtctgatcccatacccatgagccagatctacgccaacatcaagatcgccatcggcggaggcatcaacgagccccgcgacgctctcggcacgatcgtctatggattgctgaccaatcccgagcagttcgaggaggtcaagaggcagcaatgctgggggcaggttttcgaggaaggcgtgcgctgggtcgcaccgatccaggcgagctcgcggctggtattggaggatacggaaattcggggttttctcgttccgaaaggggataccgtgatgactattcaggcctctgccaatcgtgatgaagacgtctttgaggacggagagcgcttcgatgccttccgccagaagaatgcgcaccagtccttcggctccggcccccatcactgtgctggggcgcaaatctcgcgtcagaccgtcggggcaatcatgttgcccatgctgtttgaacgctttccgaacatgacgctgccaaacccagacgcggtgcaatggcgcggtttcggcttccgcggaccgatcaatctaccggttacgctaatatgatcgcaactattagcgccgtgaatttctagtgacgattctcgagttaaacggacgactaacccatccgacctagaaatggaaagtggcagaagggccggtcgctgagcgaaacatgcatgcagacgcgaccagcgcgcttattgttcacttcacctggcaatcggcatcggcgcttaagcgtgaaggtgcctatctaggcgctaagacactgcttatgcagtgggaaaaatgactgtttcaacatcctgctttatcgccaagcccattgaattgcaggatgtcaattgcaaaagtaatacaataaaaattgaggctctctcactatcaaagtaggctccgagtgattgagagaagaaggagcatgcacgatggagcccagccaacgaatcttaaatgatgattcccgagcttcccgcacggaagccccttctacatcgacaaatgcggatatgcctcccgagcttttggctaaggtggcgacttatattcctacccaggacccggtagaaacggcacgaaatcttggaagcctggaacgcacagggcgtgcgggtcgtgaagccgttacaagcgatcccgtcggaaaatatcacgcgcgaatgaaacgaattggcgcttccgccagaaccgtgttcgatacggtcattcccggaaatcaattacctgagtgggagacgaaccgaccctctccgacagccagaacgaaagccgttggcccaattcttaagttccagtctgaagggggaaaatcgagatttgtcaccaatatcctcaatttaccggaatctgctcagtgcggcgcaattctcagcgtcataaagcacttggatgatcttggtgaagcaaataaaacgcgcctcatcgaacgctccatcgagattttgcggctagatccccctttgacttggaatatgggccagaaatgccctgcggccgatgtgttggtcgaaggagaaaggtacctgaatgcggatcaacgggctcgcatccaacaagagaggagcagccgtccgcgactgtctcccttgtttcgtcgagcttatgctgattttgaggttcaaaaaaacatggacgcaaatcctataagatatagggacgcggcggagcccgaggtcagacctatagacacagtaatcgagacaattgaaagatacagcgcgtcgttagcaagacggggtccgaatgatatcgggctcttaacagctaacggaagctttgagaaaaatatcaatgatgcgtacgcacgcacgcgagccgagctagatgcttcttcccgtgacagaaatcgctctggattatctcgataatttcttggatccaccgcgctgttataagttgccccatccatcgtctcgccgctgatagcaggtctcaaattacggtcccatttgtttcaaatgaaggtttcaccggcgattgtgaaatgcttgtgaaaccgagcgaacctaagttcgcctgcaggggccgtgtccaccgaacttgacagagatcgtagacgcagcggttttccggtttcacgccgcagcctaggcttgcctatccggcctcacctctcccgttgcgatctgatgcaacgccgtcgaggacattgaacgaaacgacgcaatctgcacggaccaatagtttcggaacgctcccgcttcctgacgtcgctccaaataggattacttatgaaacacatcattccgactctggtaggggtactcttggctacggcggttagtgcagcaaacgataatcatacactcgcgaccttgcccgagattgagctcgcgctaactgccggaaagccggtgaatgtcacggttgatttaagtttgtgcactcccgggaccaccgatacgccgccaacgaagacgcgtggaggcacccgcatagatgcgtataggatcacaactgacggaagcctcgcgtttgcagatcagcactttaccgttgaccgcgacgataagccagttgttcaatttcttcgttaccagatccggttagacggtgacgctgaacttacgatggttgtattcaaaatgccaagctatagacgtaagggtaccagcttggcctataagtgcgcgatcggtcatgggttaagtttcactccgcagtgagctttgctttctaggtagcgccaatccgatttcgtctagtccgcccccggtgaagaagtttgtccacggtggatcgcagctacgaaaaagctcctcattgcgccagcgcgcggttgagatcgtcgtgctcgaaggcgctggccatgcggtcgatctcggccgcgcgagcgccgaccgccttggctatctcgcgacatgtagccgtcaccgtcgcgatttctttgataatcgcgcgggcctgcggcagcgtgagcgcgaaaaactcggacgcggcctccagcagatcgagcgagcaggtgccctcgtcgagatcaatgttcgtcgtcagcacccgtgccttaagatcgttcgaaacggggttgaggtcgtatgccagcgacagagaccaacccgcctttccccgccacaagaaaacgtggttgcggagatggtcgtcgacgttggagatcagcacattgaagacgaaccgcccaagggaagacggacgcccatgccatcagccggacggcgatctcttcccaggtctccatactgtagtcgtcggtctccttccggaatttcgcgatggagagatgaccgtgttggtcgaagaccgacgcttttggacgcgcgccgccgagggaggagccaggggcgaagatgagttggaggtcctcatccgtttcctcgtcccggaggtggcgctcggtgatctggagcagccggccaagttcgatcagagcaggaacgccagcacgaatcggtgcctgaaaaacctcgtcgctaacccagcggaagcggagtgcgccaagccgggtctcgtcggcgacgccaagcaggtagtcgctttcggccagggtacgaacggcgcggccttcgcgttccgcgaggcggcgctcggcgcgctgcatgaggcggcgcccccaagtatccggcgcggagtcgcccatggagtcgaacgtcgccagtccggcgggaggagcgaaagcgccacgcgtcagtgcaagcgctggctccagcgagaagcggtccgggtcctcaagccatacgcctaagtattcgaagaggatggtctccgtgcctcgggcgcgatttgtcctcgccagtccgatcgggcgcgttcggccggccaggtcaacatgcacctcgaagtcagccatcgcgggacgatccggccgggcgcttgagatggacgtgcttgggctggtcggcgctggccagtgcctgcccgacgctgtcgttttcacttctctgcgtcaccaggaagtttttggtgtgttgatgccttcacctttcatatttgccggtgatagcaaggaaagctcttttcatcgggtttctttccgcatcccttcgacaaatcccagcccgacgacggtccgatttcaaatgtagcatgacatcggttcggccgaccatgcccaagtggtagagtcgggctggtcgaagcgatattggaggctgatcaatggataaagaaaagcagcagaccggcatccctcatgactctcccgctgttggaagcgatgcggaaccaaaaactaattttccacctgaactgctcgccgaaattgcgacacatttgcactccgacaatccggtggaaacggcaaataatctcgcgaattttcagctcgcaagtcgccaagtacgggatgcggttcaggcaagccccgttgcgctatttcatgctcgagtcaaccggcttggtgcttcagccagggccctatacgacgcatcaatacccgacgatcgcttaccggaacatcccggagatgacctgccggcggtgccatcttaccatcccaccgaacacatagtgttggaccaattcttaaattccagtcttcaggggcaaaaagtatgatcgtagatcacgttctcgatttgtctgaagcatttgatcaagctctggcgattgcgagcgttgcgcgccgcctcggtgattttgatgcggcaaatagaaacaggttggtaggccgagcgattgagatttttagacaagatgaatcggtagacactagccgtatcgctgcccaagcgctcataagcgggcatgatcatttaaacgaaattcaaaaagctcaaattctgaacgcgatagttgaccatgaggagcttgcacaagtttataccaggatgacccatcatcgggatcaaagccggaccgttgcaactctttctgtgtccggccatacgtcagtgtcgcaaggcccacttctggaaaagaccgtcgacacgattgagaaatcggtcgatgcattgataacagatgcgccaatcagttcgaacgagcaatttcatgccgttcggccgatcgcgaaatccattgaaaaagcttacaatcatgcacgagctgagctgtttgtggcgcggcgatctggatgaggcggaggccgcgacaatctggcctgattgtcgctacgcagctgttggcctctccccggggaagagagaattccggcgcaatccggtgagctagatgctcgggttgccttaacaaaatagctgccgatcgctgattggcccgttgcgcccgcttggcgcagctcacccaatccgagctgcgttgcccgtactttcgccggattgcacatctaacccgatatcagtttgccagatcgcacccaaagttcggcttctcgtggctgctgaataactggcccaccgatccgctcctgaccgaggaattaaagcgctcgaacaccggacatccggtttaaacgcgtgaaaatgccgccaatgttgaactcatgatccggatgccgaggtggcttggatagccggtcgcaaatttcacacgaaccttgcggtcagagccgatgttcattggacttcctttggggtattggcatattgccctggtcgttgacactatcgccaccccgtgtcagcggcacgacctgtcgccaacttagcctttggtgacagggctaaaattcaactgatccccttgaccctcaataagattgggtaaaatagagcacaaccgtgcttggcagctggggatcagttcttgagaacgctttcgaatggtgcttgttcaaaattgcgagcttcgatcagcgcttcaataatcgcaatagtcaggcgcatgatacaatgatcagtgctccttcgatgaccttctgatgtagagcgaagcaaatccaatccttgggccgacaccatctcttcggcgcgattaatcgtgagcgtccggtgaactcattttcgcgtggttgagggagcgaagctataggacgcgtttcatttcatctgccatgacgcgctcgatgatctcggggtcgcattgttcgtcgacgagaaactggtggataccaccatcccacgtccttatgtcggttaggagattttgaagttcgtcgataccattctcggtcagacccttcgtgccatcttcactgccatcgctgacgtaaaccagttcgccctcggagatgttgtccgagttggcggtcacctcctcgatgagttcgaggttctcgccgatcatgacggcgacttgcttgagcgtgtagatgaacctcgagcgtgccatcacgcaacctcgcatcggtctttcgctggcgtccagttccagggcaataggtcctcaagtcggcccttggggtgatcctggatccgggtcaggacgtctgtcagatagacctccggattgtggccgtgcaatttgaccgtttcgatgatggtcaggatgttggcgatgcgctcaccgcccttatccgagccggcgaagagccaatttttccttccaattccaatgccccgttcattctgcccatgtcggcgatgaagtcgaggtctgttatcgctggcatccctatttcggccagagggtttccattcgccgcgtcgaagaacgcgcgacaggtcggtttttgaaggttttggggccgaccggtatcgtgatctcgatttcggggtggatgattgatccctttgtgtgcggcggcatgaccataggagcggcgcgcgtcgatcttgcggcgctgatcgaactgaacaggctggtcaccggcagtgacaagcctgcactctcccggggtggacgtagaatcactcaggaggaagatgatgagaccccgcaacacgctggtgccggcgtcgggccggcagctcgacctgatattcaaaacccggacgctcgacggactgagcgaccacgaccgcaagaaggcgatattaacgctggcttgcctgctgatgcaggcggccggtcaggtcgtcgaggagctcaacgatgaccagcactgatttgtttccgacagcgctgctcgcgcgcaaggccgtcgtttatgtgcggcaatccacgcagtcgcaggttatgactaatctggaaagccagcgacggcagtatgatcttgttgatgtcgcgcgacaacgcggcttcagcgacattgaggtcatcgacgacgacctcggacgctccgccagcggaactgtcgcccgccccggcttcgaccgtctcgtcgcgctgttgtgcgccggcaaggttggggccgttttatgcctcgacgcctcacgactcgcacgtaacggccgcgactggcatcatctgctcgaactatgcggcctcgttgaggcccgcgtcatagatcacgatggtgtctacaatccatgtcggcccaacgatcgtctgctgctgggaatgaagggcagtatcagcgagttcgaactaggcgtgctgagagcccgcatgctcgatgccgccagatccaaagcgcgccgtggcgaattgcgactttccgttccgttcggctacatttggcatcgagaggccgggcttgggctcgatcctgatctgcgtttgcaagaggtaattcgatccatcttcgcccgcttccacgagcttggaagcgcgcgtcaggtgctgctgtcgatgacgaaagatcagatccacttcccgcggccgtcggacgaagggcgcatgaccaacttcgtctggacgccggtccgttatcgcaatgtgatcggcatcctcaaaaaccctttctacgccggggtctacgtctatgggaagagtgagaagcggactgccatcgtcgatggacgggcgcggcgcagttacgggcatggcaaaccggctggtacttgggaggtgatgataaaggaccaccacgagggttatattagctgggacgagtacgagcgcaaccaacagcaactggcgctcaataattatggccgctggggcgggactaaatcgggccgcggcggcaaagcgctattgtcgggtctcctaacctgcggacggtgtgggcgacggctgagtgttgcctatacgggcaatccgcaaagtcctgtctatcgatgctataagcagaatctgatgatgggcctgccccggtgcatgacgttcggcggcccgaaggtcgatgcggcggttgcgcgcgagttgttgcgcgcggtagaaccgttagcgatcgaggcgacctttgaagcagagcggatgaaccgggaacggcaagaagaccagcgccacattcacgatctggagctacaacaggcccgctacgaggctagcctcgccgagcgccgctatgcggcatgcgatcccgacaaccgcctgatagctgcacagcttgagaagaattgggaaacggcgctacgccgcgtccgtgatctggaagtgcgcaggcctaccgaaagtccttcaaccatcgaagttgacccaggcactttcgcgaacatagccgacaatctcttggcagcctgggagtcgccggatgtcaccatgcgcgtgcgccagcaactgctgcgtacgctcatcgccgacattgtcgttgatgtcgacgatgcggtgcgcgacgtggtgctgacgattcattggaaaggcggccagcattcagagttgaaagtccgcaaacctcggactggtgaacacggctgtgccaccacggacgatgctctggcggtgatgcgcagtatggctggtcgctggtccgatgaacatatcgccgcgtcgctcaatcgaatgggcatgccaacggggcaaggaaaaacctggaccgcacaccgcgtcgcttccgtgagacgggtacgcgcaatccacgcgtacaaatcagccgacaaggacggcgactggctgaccatgacagaggctgcggcggctttgggcgtgaccaatcatcggatacgccatctgatcaagacgaaggtgctgtccgccgaacaggtggttcgcggtgcgccgtatcaaatcagggccgccgacctggattctgcgacggtcaaagccgcgatagcccgaaagggcagcccgtgtcgcatcgccgacgcggagacgcttccaatgtttacagacacttaaagaaggagtgcataatgactcaggtctggcaagtggacgcatggctcgttcagctatgttgttatcgatttcgacacggccatcgtcgatgtaaacgctcaacgctgcccatcgagagagggcatatcgcattgcctcggccagcttctgcttctgcggcaacgtcgaaagcgtgtcttcgatccagaccttcagttcttccagaatgggcctggcgtgttgttggcgcagtgtacgccgctggtcggccggcatgccgcggatacgatcctcgatatcgtagagcgcgccgatgcgcgatagcgcttcgtcagcgatcggcgatggcttcagcttgatcacgtcatggaacttgcggcgcacatgcgccatgcaggcggcctcgacgatctggttgccgtagagcttcttgtaacccccatagccatcggcatgcatcacaccgctgaagtttgcgaggtggtcagccggatgcatgcccttgcggtcagggctatagtaataagcgatggcaccgggagtggcggcttgatagccactgccgtcgaagacgtagacccagaccctgccggtttttgtcttgccccgtccggggtcgagaacatcgacgggggtatcgtccgtatgtattcggtcaagcgcggcgatatgggccctgatagcaaagacgagcggcgcaagcagacccgatacgcggccgacccagtcagccattacggatcgggagatgtctatccccaaccgatcgtacatctcggacaggcggtagagggggatgtgatcgtcgaatttggcgatcatgatatgggcgagcagtcccggtccgggtttgccgcgctcgatcggcagggtcggcatctcgccagccaccgtcgtatcgcactccctgcagatcatgcgcttttcgacatggcggacaatcttgaccgacgccggcacgtgctccaacacctggaccaccctgtcggcggccttcaggaacgatgtgccaccacaggtcgggcaattgcagggggccgcatagaccaactcttcggtgggaagaccatcgggcaatggtttgcgcttcggcttgtccggcgcgtcgtccaactccggcagaggagttttcccggagcgcatttcagcctcggcacgggaggcctcaatctcctccagcatcagttcgaattgctctatcttccggtcgatcttttccgaagacgcgccatgctgccggtgtcggagcaattccagttgtgcccgcaacagcccgattatggagtcgcgcttgatgacctcggcttcctggctctcaagtttcgccgcctgttccgcgacgagtgcgcgcaaagcagttagctcgtcctgactgtccagcggggctgtttccatacccgcaaatctagccgatttgcccctggcacgccaccaatataccccggatgcccctgcaaaatatagcttttatcccgttcgaccgggagcggaagtccacgccgggcgtcgccaatcgatcccctcaacgagcatcgaaagctgcgcctgcgtcaggtgcgccacgccctctttcgccgtcggccagggaaagtatccgcgctccaaaatcttgtagaacaggcagaacccttgaccgtcccaccaaagaagcttgatccgatcagcgcgttttccgcggaagccgaagatcgcgccggagcccggtgcctccttgatcgccgtctcgaccagcgccgatagaccgtcaatgccacgccgcatatccgtcaccccgcaggccagatagacacgcacattccccgaaggcccgatcatgccgcctccagacaggccaccagcgacgtaagcagcttcagttcaacgccaatcggaaccttcaagcaccgaccgtttcggagcaagatctcgacaaccgctggcctcggtagcgtggtagacgcctggcttacgcccacctcctcggtaatctcaaccggaaggaacatcgccggtcggtcaacatagctgaatgactgccgccacaagcggatctgcccaggatgaatgtcatgccggcgagccacatcaccaatgcgagcgccaggttcatccgcctccgccaatatcctcagtttcgcctcgtccgaccagcgccgtctgcgctcagtaccggacatgatctcaattcgagccatgaaacctctttgatctggtattaatgtcagcactaatgctggttctaatgccagagcatcgcctgatttgcccgatcagcaaaaaccgctcaccggacgctcacgattaatcgcccattctgtaaagctcttcgaacctgacatcgctcttcccgataggcaccgctatccgtgttgctgccgcccttcgagggcgggaagaaaaacaagcagttaaggcgcagcgaatcgtccgccgcttcgccaacctgccgttgtgaaataggtttcctcttcgcggcaaagtgcgtctgcgtctcttatcaggagatggagctgctagccggtcgcggcacgaacagtatcgatcggcggacctattgacgttcgcatcgtcggaacattagcgctggccgtccgagccagtcccttcacgaatgatccgaggaaacaaccgcggaaggatggccgtccccgcccaaatgttttcagccaagccgtccaacacggctccgatagaccggtcctgcgcagcacaccctttagagcgagtcgcggagcttgaaaagcgatcaggatggcttgcggcaattcgctctccttcgagcagtgaattcggtgatcgtcgcacaaacgctattgagaaagcaggcgcggaactggaaagtctagcaccttgtccgtgtaactttcgaccaaggtgctaaacggcgtgccgtctcgaagtttcagtacggcacgatgttcgaggaggaacggcgccagcgcaagagaacccgttccaggcgcgatcaagccatccatgtcccagccttcggatagaggggaccagagtaacttggcggataagtttgtgcgagtgaaattgagagccagaacggctctgccgaacgcaatatcgctggtattcaacgcctgattcatctcggccgttaatcttgccggcacataccaattgtcggcctcggataggacgcggtcgccgcagaccaggcgaacgcggcgataagcgatcggttcgtcggacccaacgctcaagagttcgcggatgtgctcatcggccggcttgtcttgcccgcgcacacgctgagctacgatcttggaaccttccggtgcgagcttgtgcgcggcgcaccagcgatcaagggtcaaagtagcactggcgttaccgaggagattggcgttcaacgtctggaggaccgcaagcgcttccactcgagaggccggcgtgttcagccactgagaccccatagccgcgtcttgcgcaattgcgatctgcgtgccgagcacgatggaggtcgctgttagtgcgacgatgcgaatgcatttcaaaaagcgtaatgacacggagaatgaaatcctttgtgcagcaaatttgatgggcgaaccttgcgggtcaaatttccttggttttaggaggcgaaagcggctttaccggtggacagcaagcgttggcgagtgagataccacatttggttttcgtccaacgcggcaacaattttcatgatggcatatgcaaatccaatagacttgggtttcaagccaggggcgtggcggccggttggaattctcccaagtccgtcaatcgtttttctcacatgccgggctggggctctttgtcctccccctcgctcattgcgagatgctcatatagctggatcggataaaatagctcgcaaccgaaagcaaaatcgaggagcaattgttcgaaaaaggacctcctctttgacgtggaacgcggccgccgatcgggcgacaattgtagtccaggtagggatacgccgtcgatggttgccaaacgcaggtgtgagtcaccgctgcgcttgtctgattccttttggtgccccatgtcatcgtactccttgtgtaagcctagcgatgatatgtgcagtccatctgcagcataatgattacgggagagcgaagattggtttcaaacgtagccaaataagcctgccgtaagtaatgccaattggtcaggaccaggcacggcacgcaatccttggctttgttagtgtacaatgaagacgtgcaaaacgaacggctatcgatgcagatcgactttcgatctatggccgacgtgggcccaatcgggatctgcaaccactggaactcgacaccggggaaaatgcctcgacggcagaacgctctttcggaagtaattagttactcaattgagacgttcgaatcgctttggctttggcgtggggccgccgcgccgtccatagccagtccagcaggctaaaatacaaagtggcagctcattgtatccgcatcaatgtggctgggccaacgggctggcgtgcaccatcttccggccattgaggaaaatcgcgttcctgcatgatcgcatgttcgagatattctttggctatggcctctatgagatcttgttgccgctctgcatcaatatctggcaactggttgattgcgagatcgtgttttcttgcgaagcgaatcgcgcaacgatatccgtcgatatcttccaaaatcggtcgggtggcagggtagttccagagttccgccaattcctccaacaacgaggggcgatcttccctgatggcaaacatttccgtaacgcgttgcttggctctcgccagaaaggcgtccgaatccccaaggcgcaaccgcttaacgtgccattgaaaaccagatttccaatacggacttttggccatgcagttgagaagtgaaaccgagccgccctccaatatgagcccctcttcggactcctgccaatccacttccaaaatgagccggcgatgggcgccctcggcgtcaatgatacctttggtaaggcggcgagaatccaaatatattctccgcgttgattgcaattccgatggcaaaggccttccgctaccggtcgctatttgaggacagcactgcacacgatcaagggcaaccaccggccacccggttttttgtgcgatttggatcgcaatgtccgttttgccgctgcaagtcggtccgtagatgagatagagcaacacgtgcgcctcatatagatttaatggaataccccatctgtgccaaaccagatcttccaattcggatcttgatttttactgtgggaagcgtagcagctatacgtgatcggctgaactaatatcgcgctacacttgtaattgtgcaacgctgacgttgccggctcacacgcctatgaaagcttccatccccttgtccgtctgagcaatcggggcgctgcggcacgacccttgcttatggtggacgcagccgaccctgttggcgcaatgtcgaaaagcgtataagcgatttgggtagggaagcacatcagccgtgcggtacgcactgtcagcatccgacggttcatgctgaagcttttcgggatgacctaaaatgaaaaatgccgctgaagaatatataatggatatgcgcatgaaacagtcgattgcgtttcaaatatcgccgatgtcctggatcttacgaagacgacagctttgaggcggtacgaacacacacttaaatctccgcggcgcccgccacggcagtgctcgccgctcgtagcatagtagcttgctcaggcgatgcatgatcagccattttgtctatgctggcgatttcatttcttttcgatacaaaccgcgatatcctgaaagccaccacgcgcagtcaaacaacactcggcgactggaaacatcgttggaatgccagggctgtgtttcatttgaaacaaactgagtcgacgtctgtgatttcaaacccatttacaaagcctaccgtgcggcctaagcgccacgggagtgggactgagcgttggcacgaggacataagtgcggatgaatggaaggtattcaccgactcggcaagatttcaagacaggcgccaagtcttggtctgtcctggctctgatagttgctgcaatgatttttgccttggtagcgattgcgtgctggcaggacaatgaaaccaatcgggcaatcctgacccagttgcgggcgattaacatcgacagtgcctcgctgcagcgggatgtactccgcgcggatgcgggtatggtggggaactaccggcccattatctccaggttgggggctttgcggaagaacctggaaaatctgaagcgattatttaaacaatcccatcttgtgagcggcaacgatttctctcaactgctagaccagctaaagatgtctgtggatacgaccgacgcggccgtcgcatcctttggaacgcaaaacgtgctcctgcaagattcgcttgcgagcttcactcgcgcgctgagtattcttcccaagatgtcgtcgacggatcagacggtcgaaaattcgatcgaattgggcagcctgatgctgcagtttacgcgtcagccaagcccagcactttcgttagagatcagtcgcgaactcgacatgctccaaaaagctagcggtggggatgaagctcctatccgtatacttacacgcgagggtcacgttatcttgtcgcttttgccccgggtcaacgatgcggtaaacatgattcaggcctccgacaccgctgaaattgcggaaaggttgcaacgtaagtgtttggaggcctatagcttacaaagcgtgagagagcagcgggcgcggatcttcttgagttccgtgtcggtgggcctttgcatctacatcatctcactggtctataggttgcgccggaaaacggattggttagcgcggcgtttggattatgaagagctaatcaaagagattggggtttgttttgaaggcggtggggccacagcttcgtccgcgcaggctgcgcttggaattattcagcgtttctttactgccgattcgtgtgcgttagcattagtggaccatgggaacaggtgggctgtcgagagtttcgctgcgaagctgcctgagccagtctgggaggacgaggcgctacgcgaaatggtctcttttgccaaggcggacgaacgtgcgtcagtattccgcatcatgtcgacgcgaaaggtcggctgcttttctccagaaattccaggcctttcgatactattggcacacaaatctaccgatcacctgacagcgatttgttcactaagttaccaaagctatcgtctgcgaccctgtccgggcgaaattcagcttcttgagctcgccaccgcgtgcctctgccactatatcgatgttcggcgcaagcagtccgaatgcgacattctggagaggcgattagagcacgcggaacgtcttcaggcagttggtacgcttgctggtggaatagcgcatgaattcaacaacattttgggagcaatcctcggctacgctgaaatggcgcaaaactcgctgcgccggtcatcggtcacccgaagatatgttgaccaaattatttcgtcgggtgacagagccaggctcattatcgatcagatcttagctctaagccgaaaactagaacgcgtgacaaagccgtttagtgtctccgagctcgtgatggagattgctcccttattgcgtgttgctttgcaacgcaacatcgagctgaatttcaagtttgatgataagaagagcgtagtcgaaggaagcccgcttgaggttcagcagatactgatgaacctttgcaagaacgcttcccaggcctttaccgccgatggtcaaatcgacatcttcattagccgaacttttatatctcgacagaaaatactggcacatggcgttatgccagccggcgactatgttcttctttctgtcagcgacaacggtgaaggcattgccgaggctgtgctcccccacatttttgagcctttctttacaacacgctctcgcagcggcggtacgggtctaggtcttgctgccgtgcacggtcatgtcagcgcgcttgcaggatacattgacgtaacttcagctatggggcgagggacgcgcttcgacatttatctacctccttcctcgaagaaccccgtcagccccgacgcgttttttggccgctgcaaaacaccgcgtggcaacggagaaattgtggcattggttgagccagatcctgtcttgcgagaggcgtacgaagataagatcgccgctctgggctatgagccggtgggctttaagacatgtgcagaactttgcaattggatgtcaaaaggcgaacaagccgatctggtcctggttgaccaatcgtctctttccgacaatcagagtgctactgccttgcatgcagccttcaagacagcgtccatcatcattggaggaagtgatcttaaaatgtcgctttccagggatgacatgacgtccgcgctttttctgcccaaacctatatcctccaggaccatggcctacgcaattcgcaccaagatcaaagcctagagttgaggagtattcgggaaacttaacgtctgttcggcgcgcctaagacagatggtcaggccgagatagctgtggtttcttccagtcgctttcggcagccggttgtggcggtcgtttcccgagacccaaaggttggcgattatctgctgggcctttcgatacggtcttcggtgaacaaggcaatatgttcactaagctcacacgcaggatagtcgctatgggcggacaaacagccgtctatcgagaacatctgcatggcgtaatcacctaaatgtctttgttcgtttcgagcgtcgtagcggctgtccgactaaataagcgacggagttgcgacaacccatatggcgaccccgctttgcttcccgcgggtctgatcaatgttgttgcttctggctttttgcaaagccggcttttccgagcgttcggcgccgagcgagtttagcgatacgctcctggacaacatcgctgctgatatcggcggaatcaaaccggccgccgtacaagcgcatgaattcgcgatgctgaggatgccgcggtttggccatttctttcaggaagtccgtgaagccggatgttcggccaacatcctccggcggcgccctgagctcaccatcgaggaagcgcggatactccaggaacggattgcgatccttgatggcttcgattgtgatggcgtgctgccagttatcaccgaagtcataggtataggtgaaggtcgacacaccgcgatcgatgagtgctgcaatgcagacgttgcgagcggcataagtcttgcggtcgtaggcgtcttcaggatcaggtacatcatatcgtctaccaccggcctcaaactcgaagagatgataatcctcaaacagcatcgtggcctgaatgacgtcgtggagacccttgaggctcaagtcaagtggcacctcgatcctgcgccagatcgctggttccatcccgttgagttgaacgagcaggcgagctaagcgatcgggcggggtcatggggccaaaaccaaggttgcgcgttgatctttccaactctggggcagcaattcctcgatatgtgtggttggcatgcgccagagcatgcggagcagccatgcctgaccgtcgatctcgttgagctttgccgtcacgactaccctcgctacgcaaatgacactatcgacaccctgatcggaacctgcgaagaaccacagttcattgaaaccatctcccgtccatttcgcccatatcgacccgatatcgacagtgagatcgcagttcaacatcgttgccgataacgttaagccgtacgaattcacagcttgtattggagccaccgccgtctaggcttgatggcaagttgcatgtccggcgagaatcatcgcctgcgtgctggcaaggtcgtcgggaggctgatcggccagatcggtcatgagaaacggaaccatattcgctcccatctttccagtcatatcgcgatcccgtgcttgatccacgatttccaacatttggcattgcatcacagggtgaccgtcaccgtgcggcgccgaatttaacttcggtggcattctagatcctcgccgttatcctagagagccatctttcgtcggcggacccttgagtgcttggaaaaccgttttcgcttcaaatgaaatcgaaaagaagaaaacgaaaatcctagagtaaccgaccctcccgataatcgtgaacatcagatgatagcatttcttctgaccgaaggggctgtgttggttatgagcttggggagatggggaatcttgaaggcaacggggccgctgtcgatcatcttattggcctccacctgcctctcgagcggtgcggccccactttcatttgctgagttcaataattttgcacgcgaatgcgccccatcggtttctccatctacgcttgcagcgatcgcgcaggtcgaaagtcgctttgatccgcttgctgtgcatgacaataccaccggcgaaacacttcactggcagaaccaggctcaagcaacacaagtcgtgatggaccgtctcgacgcacggcattcgctggatgttgggctcatgcagatcaattcccggaatttttccgtgctcggtctgacacctgacgaagcccttcaaccgtgcacgtcactatctgccgccgcaaacttgcttgggagccgctacgctggcggcgacacggctgacaaaaagcaattggcacttcgtcgggcaatctctgcctataacaccggtgatttcacgcacggctttgcgaacggatacgtgcgaaaagttcaaacggccgctcaacagcttgttcccccgttaaccgagcgtccgaaagacgatcgtgagaagccgagatccgaggaaacatgggatgtttggggttcatacaagcgtcgttctccagagggcggagctggcggttcatccggtccgcctccgccgccagaccaggacaaccgcaagtccgaagacgacgatcaacttttgttcgatttaaataaaggaggtcagcaataatgcgacactttgaaaaataccatgtgcatatgaatcgcctctcgctctcgaacgcggtgatgcgcatggtatccggctatgcgccgagtttgggtggcgcaatggggtggagcattttctcctccgggccggccgcggcccaatccgcaggtggcggcactgacccagccacaatggttaacaacatatgcacgtttatccttggtccgttcggccagtcactcgctgttcttggcatcgtggctatcggaatctcctggatgttcgggcgcgcttcactcggtctcgttgccggcgttgtcggcggcattgtcatcatgtttggagccagcttccttggtaaaacgctgactggcggtggctgatgaatgatcgtctggaagaagcaaccctttacctggcggcgacacggcccgcattgtttcttggggtgccgctgacattggcgggactattcatgatgtttgccggctttgtcatcgttatcgtccagaacccgctgtacgaagtcgttctcctgcccttgtggttcggagcgcggcttgttgtggagcgagactacaacgcggccagcgtcgttctactgtttttgcaaacggcgggaaggagcgttgatggtctgatttggggcggcgcaagcgttagcccaaatccgatcaaggttcccgcacgagggagaggaatggcgtaatgctcggcgcaagtggcacgaccgaaaggtctggtgaggtctatctaccctacgtcgggcacctcaccgaccatattgtccttctagaagatggatcgatcatgacgatggcgcacgttagtggcatggccttcgaactcgaggaagccgaaatgcgcaatgcacgttgccgtgcactcaacacgctcttgcgcaatattgctgatgatcatgtttcaatatatgctcacctcgtacgtcatgacgatgtgccgccgtcacctgcgcgacatttccgcagcgagttctccgccaatctgagcgaagcttttgagcagcgcgttctctccggcaaactccttcgcaatgaccatttccttacgctgatcgtgtttccccagaccacgcttggcaaagtaaggcgcaggttcactaaactccacaaaaagaaagaaaacgatctcgcaagtcaaatcaggaacctggaagatctctggcatgttatcgctggcgctctcgaagcgtacggcctgcgccgtcttggtattcgtgagaagcaagatgtgcttttcacggaagttggagaagccctgcggctaataatgactggtcgattcacgtcggttccggtcgttagcggttcgctcggcgcctcgatctataccgaccgagttatttgcggcaagcgaggactcgagatccggaccccaaaagacagttacgttggatccatctactcgtttcgcgaataccccgcacggacgcgaccgggtatgctcaacgcgctactgtctctcgatttcccccttgttctgacgcagagcttctcgttcctgactcgcgcgcaagcccacgcgaagctcagcctcaagtccagccaaatgttgagctctggcgacaaagccgtcacccaaatcagcaaattatccgaggcggaggacgcgctggcgagcaacgaattcgttatgggatcacatcatttgagcctttctatatatgcaaacgatctcaataatcttgccgatagaggtgctcgggcccggacgcgattggcggatgcaggagctgttgttgtccaagagggcattggcatggaggcggcctattggtcgcagctgccgggcaactataagtggcgcacgcgtccgggagcgatcacttcgcgcaacttcgctggtttggtctcgttcgagaattttcccgagggttctggctcgggtcactggggcgacgcgattgcacgctttcgtaccaatggtgggacgcctttcgactatatcccgcatgagcacgatgttggtatgacggcgatattcggtcccatcgggaggggcaaaacgacgctcatgacctttatcctcgccatgctcgagcagagcatggtcgaccgtgctggtacgattgtcttcttcgataaggaccgtggcggtgagctgctggttcgggcgacgggaggaacatatttggcactccgtagaggagtgccgagcggattggcgccattgcgtggcctggaaaatacaccggcctcacatgatttcctgcgcgaatggatcgtggcgcttattgagagcgatggccgtggaggaatatcccccgaggaaaatcgccgtctggtgcggggcatccatcggcagctctcgtttgatcctcacatgcgctcaattgccgggttacgcgaatttctgttgcatggacccgccgaaggtgcgggagcgcgactccaacggtggtgccgtggcaacgcactgggctgggccttcgacggcgagctcgacgaagtaaagttggatccttcgattacaggcttcgatatgacgcatcttctcgaatatgaggaagtatgcgctcccgccgcggcatatcttttgcaccgcattggcgccatggtcgacggccgtcgctttgtgatgagttgcgatgagtttcgcgcctatttgctaaaccctaaattttcagcggtcatcgacaagtttctgcttaccgttcgcaagaacaatgggatgctgatactggcaacacagcagcctgagcatgttctggaatcgcaactaggcgccagtctcgtcgcgcaatgcatgacgaagatcttctatccttcaccgacggcagatcgatcggcttatatcgacggactgaaatgtactgaaaaggaatttcaggcgatccgcgaagacatggcagtgggtaaccggaagtttctgcttaaacgagagagcgggagcgtcatctgcgaattcgatctgcgggaaatgcgcgaatatattgcggtactttcggggcgcgccaatacggtgcgcttcgtggatcagctgcgcgaggccggaggagacaacccatccgcctggctcagcgaattcatggcccgttaccacgaggcaaaagattgatcaaaggtggaaaacgatgaagacaacgcaacttattgctgcggccctggccgtcagccttctttcggtggggccggtacgggcgcagttcgttgtcagcgatccggcgacggaggctgagaccctggcgacggcggtcgagactgcggataatctcatacagaccacaatgatggtggcgatgttgacgtcggcttatggcgtcaccggactgctaacttcgctcaaccagaaaaatcagtatccctcgactacaaacctggacaccgagatgttttctgcgcgaatgccaatgtcgaccacggcgcgtgcaatcaccaacgatgcagatcgcactgtggttggtggcgacgctgaagcggacctgttgcggtcgcagataacgggttctgcaaatagcgccggcattgccgctgacaacctggaggcgatggacaaacgcctgacggcgaatgccgagacgtcggcacagctttctcgctccggcaatatcatgcaggcaaccgtcaccaacggtttgcttctcaagcagatccacgacgcaatgattcaaaatgtccaggcgaccagcttattgacgatgactaccgcgcaggctggccttcatgaggcggaagaggcggccgcgcaacgcaaagagcatcaaaagaccgcgaccatttttggggcggtcccctgagatagggcaatttgttcgcaccgctcatccgcgcatttcaggatgcgggttcattgtatccgacattccgcgatgagccagccaagttcaggtccaaacgatgaatttcacgattcccgcgccgtttacggctattcatacgatcttcgacttagcctttacgacaagcctggatacaatgattgggacgatccaggaggcggtgagcgcgccgttgatcgcttgtgtcaccctttggattatcgtccagggtattctagtcatacgtggcgaagtcgacgtgcggggcggcatcacgcgcgtgatcacggtcaccgtcgttattgcccttatcgtcgggcaggcaaactaccacgattacgttgtttcagtctttgaagagactattccgaactttgttcagaagtttagtggcagcggccttccactgcagacgatacccactcagctggatacaatgtttgccctaacccaagccgcatttcagaaaattgcatctgaaattgggccgatgaacgatcaggacatccttgcttttcagggggctcagtgggtcttttacggcacactctggtctgcgtttggaatctatgacgctgtcggaattctgacgaaagtgcttttggcgatcggtccgctgatccttgtaggatatatctttgatcgcactcgcgacattgcggccaagtggatcgggcaacttgtcacctatggtctcctgctcctcctgctaaacctcgttgcgacgatagtcattctaaccgaagcgactgcgctcacccttatgctcggtgtcattactcttgccgggacgaccgcggctaagatcattggtctttacgaactcgacatgttctttctcaccggtgacgcgctcattgtcgctttgccggcgatcgccggcaacattggaggcagctattggagcggcgcgacccaatctgccaacagtgtgtaccgccgcttcgctcacgtagagcgacgctaggtcgcgcgaaaaaatcgcgtcaatggagaaactttatgaaatattgcctgctgtgtctggcactcgctttaactggctgccagacaaacgacaaattggcgagctgcaaaggcccaatattcccgctaaatgtggggcgatggcagcccacgccgtcagatcttcagcgcagcaacgcgggtggacgccatgaaggggtctgaatacgccttgctggtagggcgggaaaccctggctgagcactataaggaagtggaatcctttcaaactgcgcgtgccaaatcagcgcggcgtctctccaaggtcattgcagctgtcgcaaccgtagctatcttggggaatgttgcccaggcgttcaccattgctaccatggtgccgctgatcaggctcgtgccggtatacctatgggtacggccggacggaacagtcgacagcgaggtatccgtctcccgactgccggcaacacaagaggaggccgtcgttaacgcctcactgtgggaatatgttcggttgcgcgagagttatgatgccgatagcgttcagtacgcctatgacctggtatcgaacttcagcgccccgacagtgcgccaagattatcagcaattcttcaactatcctaacccaagttcccctcaagtcatcctcgggaaacgcggtaggctggcggtcgaacacatcgcttcaaatgatgtcaccccgggtgtgcagcaaatccggtataaacgaaccctcgtcgttgagggcaaaatgccggtcgtgagtacttggactgccacagttcgctatgaaaaggtgaccagcttgcccggtagattgaggttgaccaatccgggaggcttggttgtcacctcctaccagacatcggaagataccgttttgaacgtaggccacggcgaaccatgacgaaaaaagcatttctcactttggcatgcatacttctcgctgcgattggcgcgaaggctgaagacgcgccaaccgcgggcagacttgatccgcgcatgcgttatctggcttacaatcccgatcaagtggtgcgcctttcgacggcggttggagcaacattggttgttacattcggggctaacgaaacggtgaccgcagttgccgtttccaatagcaaagatctcgcggcccttccgcgcggaaattatctattcttcaaggctagccaggttcttccgccccagccagtggtcgtgctaaccgcgagcgacgccggtatgcgacgctacgttttcagcatctcttccaagacgctgccgcacctcgataaagagcaggccgatctctactatagcgtacaatttgcttaccctgccgatgacgcggccgctcgccggaaggaggcacaagagaaggctgttgcagaccgtctacgtgcggacgcacaatatcaacggagggcggaagatttattggatcagcctgccacgaccgttggtgccggcgacaagaattggcactatgtcgcccagggcgatcgttcgttgttgccgctcgaagtcttcgataatggatttacgacggtatttcacttcccaggcaatgtacgcatgccctccatctacacgatcaatccggatggcaaggaagctgtcgccaactattcagtcaaagggagctatgtcgagatttcttcggtttcccgtggttggcgtctgagggatggccaaacggtactatgcatttggaatactgcttacgatcccgtcggccgcaagccggagacaggcactgtgaggcctgatgtgaagcgcatcctaaaggaggcgagacgatgaacgacgacaatcagcaatcggcgcatgatgtcgatgcgtccgggtccctggtctccgacacacatcgccggcgcctttcggggtctcaaaagttgatggtaggaggtgtcgttctcgcgctatcccttagcctcatttggcttggcgggcgtcaaaagaaggaaaacgggaacgcaccgccgtcaaccatgatcgccacgaacacccagccatttcatccggttccgattgcggttacgcccgatcctccgcctgcccaggaagctgttcagccgactccacaagcgcgaagtgagccggaacggcatgaaccgcgtccggaagaaacaccgatttttgcgtacaccagtggtgatcaaggaaccagcaagcgcgttcaacagggcgaaatggatcgaggacgcggaggcaatggggaagacggccctttgcccaaggttgaagtgtccgccgagaatgatctgtcgatacgcatgaaacccaccgagctgcagccgaccagagctatgctcttgcctcatcccgacttcatggtgaccgaagggacgattatcccgtgcatcttgcaaacggcaatcgacaccaatttggcaggttatgtgaaatgcgtgttaccccaggatgttcgtggaacaacgaataacgttgtgcttctcgatcgcggcaccaccgtcgtcggcgagatccagcgcgggctacaacagggggatgcgcgtgtttttgtcctctgggatcgtgcggagacacccgatcatgccatgatttcgcttgcatcaccaagcgctgacgacctcggtcgttcgggtttgccgggcacggtcgataatcacttctggcagcgctttagcggggccatgctcttgagtgtcgtccaaggtgccttccaggcagcgagcacctacgctggcagctcgggcggagggatgagcttcaacagcttccagaataacggtgaacaaacggccgacacagccctcaaggccaccatcaacataccgccaaccctgaagaaaaatcagggcgatacggtctccatttttgtcgcacgggacctcgatttctcaggcgtataccagcttcatatgactggccgcgccgtgcatgggcgggatcgccgtccataacgaattcaacttttagattgcagacgaggtacgatacaaatggaggtggacccgcaattacgcatccttctcaagccgattttggaatggctcgatgacccgaggaccgaagaagtggcgataaatcgaccaggagaggcatttgtgcgccaggctggcgttttcaccaaatttcctttgtctgtctcctatgacgatctggaagacatcgctattttagcaggcgcgctgcgaaaacaggacgttggaccacgcaacccactttgcgccactgaacttccagatggcgagcggttgcaaatttgtttgccgccgacggtaccgtcgggcaccgtcagcttgacgattcgacggccaagcttccgtgtttctgggctcaaagaagtctcgtcccgttacgatgctccaaggtggaaccagtggcaaacacgaaaaatgcgccaagatcagcatgatgaagttatccttcggcactatgacaacggggatctggaagcgtttctgcatgcatgcgtcgttgggcggttgtcgatgttgctttgcggccctaccgggagcggcaagacaacgatgagcaagaccttgatcagcgctatcccgccgcaggaaaggctgatcaccatcgaagacacgctcgagctcgtcattccacacgagaaccacgtacggctgctttattcaaagaatggggctgggctgggcgcagtgaccgctgagcacctgcttcaggctagtctgcgcatgcgaccggaccgaatactgctcggcgagatgcgcgacgatgccgcgtgggcatatctgagtgaagtcgtctcagggcatccgggatcgatttccacaatacatggcgccaatcctgttcaaggtttcaaaaagctgttttcgctcgtgaaaagtagcgtgcaaggggccagcttggaagaccgcacgctgattgacatgctcgcaaccgcgatcgatgtcatcatacccttccgtgcctacgatgacgtttacgaggttggcgaaatctggcttgcggcagatgcgcgccggcgcggtgagacgatagctgatcttctcaaccaacagtagtttcagctactgtttaaaatatcatgggaatgttacaaaattacatttgtagcaaagctcagcaatctttgtcatcaagctgaaacatattgtttgcatttttgtcatgcacggcttagccggtattttgccgaagtgcccgtatagtgagaaaaaattgacgagtggggtctaacgcatacagcctttgcatgcatagattctgttaagctgcaaaggggtggccaggatcctagattgaaaggtgaaccgttgaaacacgttcttgtcatcgatgacgatgtcgctatgcggcatcttatagtcgagtatcttaccatccatgcctttaaggtgacggcggtagccgacagcaagcagttcaatcgtgtactttcctccgagacggtcgatgtcgcggttgtcgatcttaatttgggtcgcgaagatgggcttgaaattgttcgcactctggcgacaaaatccgatgttccaatgataatcattagcggtgatcggcttgaggaggcggacaaagttgttgcactcgagctgggagcaaccgattttatcgccaaaccttttgggacccgcgaatttctggcgcggatccgtgttgcgttgcgcgagcggcccagcgtcgcgcgtacgaaagaccgacgctcattttatttcgcagactggacactgaatatcaggcaacgccgtttgatttcggaagagggcggagagattaaactcacggcaggtgagtttaatcttcttgtcgccttcctggagaagccgcgcgacgttctatcccgcgagcagcttctgatcgccagtcgggtgagagaggaggaggtgtatgacagaagtattgacgtcctcattttacggctgcgccgaaagcttgagggggatccgacaagcccccagttgatcaagactgcaagaggtgctggctatttctttgacgcggacgtcaacgtttcctacgggggtatgatggcggcctgacgcagaggtgcatttcgccataagcagtctgttcctggcatcagctgatcgatatgtggcctgcaaagctgcctttcgtcgctcctatccgaacacagcagtgctgcgcagtgatcggataggccctctcttttgagggatcatcttttagttgtcttctccccagcaaagaaagatgcaagcgcggcggtagctagcttgtggccaaaagctcgggcagtctccaatcctaatggatcaaagtgattgcgagcgacttctagtagcggtaccgggaacatgcgggaggtctgaacgatgatggatttttcggaagctgtctgagggatcggataactcttcggagctgtgcgaaacgatccgtctgccagcatcttttcgaaatcgccaagcgcacggcgcaagatcatttgtagcgacttggaagggctgtattgaaggatcaggttgtcatagattttcgacacctgcggcgcgggcggccgcgctgaaaggaagacctggatcttttccggcgctgtcgtcgaactcagagcatccacggtaagcatcgattgccgatcagcactgggatgacgcttggcgacggccggggcaggtcgtcgatcttcctggtcgggattttctggcggctgcggtagggccgagttttgggtggcaacaggcaagtgagcctggaccatttcgggtcgagcggcggcaagccgcctggcctccccgacagacaaagcgggtttgcgaattcccatcttcacctctctaaggcttcgccaaccaatttggagatggtgacgagttcctccatcgcgatcctgagattccgttcgaggaggcgcatcgacggatcggttctcatattcagcaatgtgagatgcaacattccacgttccttcatcgcggcaaatgcgtctctctcgtgcatcggagattgcacaactggaaggcttgcgagcatgtctgacattgcacgctgcgatgtggtcagccgaccgaccgggacacgttggcgcaatacggctgtcggaattgccaagttctcgctcagcagcagctcaatgacatagcggtaggtcgacaatgcttcgtcgatatcgagcggagttaacatcgtcgggattagaagcaggtttgagctggcaatgatcgtgttgttgagctcgctcgaaccgccatgcgtatcggccagcgcatagtcaaatccctggagctcggcatcctcataggccgcctcaaggagtgacatttcctcggcggcataaacttcgcagaatgagtcccaggtattgctgcgtagggcgttttctttccatcgcgttagtggtcggttttcatcggcgtcgaagagagccactcgacgaccgtcacttgcaagagcggcgcaaaggcccatgagtgccgtggttttgccggcacctcccttgaaggagcaaaatgtcagaagtttcatatccttatcctgctagtgttgtgaaatggaagtgcgtctgtatttttgtttgtgtgtatgattttgcgattattcatgaataagaaaataattatctgaactatatttcattgttgttatagaatagttgcaaatgtaacaattatagaggaaataatccttatctgttcttgattccagtttttataggcgtaggttttcgtctgccccgatgggaaagttctgcgacggggcaatttagatcattcgctcttctatggagggagctatgtcgcaaggcagtaagcccacctcaagtgatattgccatcaaccagcgcgtaggcgccacggttgaaggtttcagggtcgtgagtacacggttgcgatcggccgaatatgaaagtttctctcaccaggcacgcttgctggggctctccgacagcatggccatccgagttgcggtgcgccgcattggcggctttctcgaaatcgatgcagagacacgtcacaaaatggaagccatacttctgtccataggaacgctctcaagcaacattgccgcgctgctatctgcctatgctgaaaatccgacaatggatttggaggctctgcgagccgaacggatcgctttcggtgaatcgttcgctgacctcgatggcttgcttcgttccattttatccgtatcacgccgacggatcgacggttgctccatgctgaaagactccttgtagcgctgccgtagcacatggcggggaagatgttggatgcccgatcgagctcaagttatcattcgcattgtaccgggaggcgggaccaagacccttcaacagattatcaatcagttggaatatctatcccggaagggcaagctggagctgcagcgttcggctcggcatctcgatattccccttccaccggatcaaatccacgagctcgcccgaagctgggttcaagagactggaacttatgacgaaagtcagccagacgaggaaaggcagcaggagttgaccacccatattattgtaagcttcccagcgggtaccagccaggcggcagcttatgcggcgagtcgggagtgggctgccgagatgtttgggtcaggcgcagggggtggcagctacaactatcttacagccttccacatcgatcgcgatcacccacacctgcatgtcgtcgtcaatcgtcgcgaacttttgggacacggctggctgaagatatctcggcgccacccacaactgaattacgacgccttgcgcatcaatatggctgagatttcgcttcgccacggcattgtccttgatgcgagctcgcgagcggaacgtggtatctttgagcggccgatcacctatgcccaatttcggcgccttgagcggcaggctcgccaaatccgtttcgaagacgccgatttggaacagtcgtcatcgcaaggagatcacccagaattcagccaatcgcccgacacagccccatttgaagcatccgcgggccgatcggagggcatgccttaccccaacaatcggcagaacgggtcgcaagttcatctccacgagccagccggattcagcaacagagccggtggcagcgtacggattgcattggagacacagcgccttgccattttcgcggacgacatagagagcggctctccgcctgtttccgatgttcgcgccggcaacgcaaacgccgattccgatcttcctcgctcaactgtcgcgcgcacgacagactacagccagcggtggtcaaaacgtccccgtgacgacgacgaagggccgagtggcgcaaaacgtgtgagattggaaggtatggcagttgggcccgaggcgaacgccggcgaacgagatagccgtggtgatcccgtcgcaccgccggccgaaacgtctcggccgtcttcattgcaggacatggcgcggcccaacaccgcgaccgatccattggctgcttcaggccaccttgagcaacggagaggcactctttcaaagcgtccgcgtgtagaagatgatggagaaccgagcgaacgcaaacgcgcgagagatgatcgcagccaggacgggcgcgggggaaatagaagatagagaaggaccgagtcatggcaaatgaagagttcaccggacactttgcgcgtcccgctcctgtggcgaatgacgaagggcgccggaccacatcgacctccattcccgcacacgcaatggctgctcgggaagatggccgggacacttctgtcgcagtgactttgtcgcgtccaccaaattcaggcatcccgcacggcatcccagaaacatcggcgagcggccgacggcttgtagcggctcatccgcaggatgccgcaatgccgctagggttatccgaaacccgcacggatctacctgcaattttgcggaagaataacggcgatttccgcaccgccatgcagcactggcgtgagcttctacacgaaaatcccgataagcgcgacagggaagccagtgcgttgccagatttaggagcaaggggcataaagcgaccgcgcgaaatcgagcatcccggcgatgcaaatagatcagtcacacgacgggaaatcggcttaggcagagagatcgatacggtcgcggcatcttcgctcgtgaaccgtgatacatgggtcgcgcattcgtcgaacgggcaaggcgggccgcaagcgggcgtgtacaatgtccagccatcggcagacagagcacaggagacctcgcaggaaagctcgacgttacccgaccccacctctgtttccgctctctattcgggtccaccctcagaatgggtcgggagagataccggttacgagaccgatagaaattcgggtgacaccatctcggcgccgatccgagggctagaggaactcgaagattcagcggacagccggtactttggccacgaagctcagagtctatcagcgaacgtgacaacgtcaatttcgaatgctgaagcaagttctcatagcgaacacactgaaattctcgacgatgtcagcagtgcccgctcgggcgaacaggggaggggtggcgatggcggagcaatccttgggttctctcatgacctttcaccgcatccgcagaggttaccacaaacaacccccgatgacttccccgagttgaccaacgccgccatggcagaaatcgatgcgatattcgaatctctctcccagaagtccctggcgagggagagcgccgcaccggtcttgcatgagcccgtatcaggggacgctttccagaaagaaggtacttccgacagggctgatggcatgccctctaacggggagccacccgttgagcaggctggcggacatttaccgcaagcgctgaggtcctcgggagcggagctcgatgatttctcttggttgaccgacgccgcgctggcagaaatcgatgcactgatcaaatctcattccaatagatcctcatcggtgcggaatgccgcaccggatttgcgcggcgcgggattagacaacgccgttgggaaagacagcgttatcgaacacgcagagaagatctcgatcgatagtccgaggcctgccagattgaatggtgagcgttcaccgaaggcacagaagtcatcgcaagcaagccttgcggattttcccgatctaactgacgccgaatgggcacatatagaagaaacggagcggatcgcaataaccgctattgaaaaggggaagcaaaaaatctcgaccaaagccgatacgcggtctggtttcggcaactcttctgtaccccaggttggcaaccgatcaggtgctccgatggttcccaataccaatcagccaattccatcgtggtaccacaaggcagagaatatttctaacggcttggtagaggacactcacatcacgccggccgttgtgagttctaggaggcgaaatgacgccgaaaacgcctctaccaggtttggtgaccctgctcctgctttgaggcattacaatcttggtagaactctcgaggcgacgcccgttcgtgacgtgatatctggcaccagcagggaccgagggctgaccgctcatgcggcagatcaattggcaatagacgacagtcggaaacggactgaccgtgatcgcaagacacagccttatataaggggactggattcgcgttcacgtgaaggttacgggcggtaaatgctggattgtttgcggcaacacccaaatccaacgcgcgatttgcgatcgatcgaagaatctcggtgaagtgatgaattcgagcaagattacgccccagcgtttagctctcagcatcgtatgttcgctagcggccggtttttgtgcggcaagtctctatgcaacattccgccatggtttcaatggcgaagcgatgatgacgtttagcgtcttcgccttttggtacgagaccccgctctatatcggtcatgcgacccccgtcttcttttgcggcttatccattatcatcgcgacatctgtggttgtgctgttaagccaacttatcatatcgctgcgtaaccgcgagcatcatggcacggctcgttgggcggcatttggcgaaatgcggcacgccggttacctgcagcgttataatcgtatcaaggggcctgtctttgggaagacctgtggccctctttggttcggcaactatctgaccaatggtgagcagcctcacagtcttgttgtcgcgccaacacgtgccggtaaaggcgttggcgtcgttattccgacactcctaaccttcaagggtacggtgatagccctcgacgtcaaaggcgagctttttgagctgacgtccagagcccgcaaatcgagcggcgacgccgttttcaagttctcacctctggatccagagcgacgaactcattgttacaatcccgtcctcgatattgcagctttaccgcccgagcggcagttcaccgagactcgccgcctcgccgcgaacctgatcaccgccaaaggcaagggtgcggaaggcttcatcgacggtgcacgggacctttttgttgcgggcatccttacctgtattgagcgtggtacgccaacgattggtgcggtctacgacctatttgcccaacctggagagaagtacaaactttttgcgcacctcgcggaagaaagccgaaataaagaggctcagcgcattttcgataatatggcgggcaacgacacgaaaattttgacctcctatacgtcggtgctcggcgatggtggacttaacctatgggctgatccactcgtcaaagcagccacaagtcgatcggatttttccgtctatgatctgcgtcgaaagaggacctgcgtttatctttgtgtcagccccaatgaccttgaggtcgtggcgccattgatgcgcctcctttttcagcaggtcgtgtcgattctgcagcgatcactgccgggtaaagatgagcggtatgaagttttatttctcctcgacgaatttaaacacctgggcaaactggaggcgatcgagaccgcgattacaaccatcgctggttacaaaggtcgcttcatgtttattattcagagtctctcggccttgtcgggcacctatgacgaggcaggcaaacaaaactttctcagcaacactggcgtgcaagtgtttatggccaccgctgacgacgaaacgccgacctatatctcaaaagctatcggcgaatataccttccaggcgcgttcgacctcatacagtcaagcccgtatgttcgatcataacatccagatttccgatcagggagcaccgcttttgcgcccggaacaagtgcgcctgctcgatgataaaagtgaaatcgtccttattaaggggcagccgcctctcaaattgagaaaggtgcgatattattcagatcgtatgctgaggcgccttttcgaatgccaaattggcgccctccctgagcccgcatctttgatgcttgcgcaagatgtccatcaggatgggcaagatcatctcagtcaacaagctgcggtcacggcggcgctgggcttaggtgacatcgattctctagtgaacaacggggaaactcctacacagcaaaacagtgatatgaatgacgaacaggataaccttgcaattggaatatacgccccccaggtctcggttgaaatcgatgacgttgtggaagacgccaatgcccgtggtgtggcgccagtttccagtgttcccgctgaaatggctccagctctgagtgcacaacagcagctgctggggcagatcattgcgcttcagcaacgatatagacctgtgtcctcaaatcccatcgaataatttgaggctgtttttaacattgggaccattcgatggacggagtcgtcacctgttgcggttctatcgaatgcggcgctagtctccgaggttgccgattgagcagatatcgccatgaaaccgtcaggaaacccgaaagtcgaccttagcggttcggctacatcgcttcccgaagttcccgccggagctacccctgtcctttatccaatcgagccccggagccgtcgggctgatgactcgtttgaggatcaaatcgctcacggcgaatatacatctgcgtcatttgatcatgatggagtgaagcttggtgcagcggaacgggaagcgttcgagaagtggggtggatcgggccggcccacatggaaagacctggtagttaaggcgcgccttgatgcaatcgacagttccgcttggctctccgattttgacgaggactccccttcgaccttcagatatgaagggattcctttgggtgaggctgaacggcaagcctacaaaaaatggcaaggagacgctcagccgacgcgggacgacctgattgtcaacgcacgcttggcagaactcggccagtctggctggattgttgacgagtatgtatcccatgaagacgtcgaggattttcgctctgattcgttgaaacgcaagcggagcaactcagccgaccgggacgagaatccccccgcatcttttcggcatgacgggatgaggctcggggagcccgagcgcgcagcacatgataactggtgcgagccggagccacctacgtggaaagacctgatactcaaggcgcgccttgatgcaatcgacagctccgcctggctcccccaattgaacgaggattccccttcgaccttcagatatgaagggattccattgggtgagggggaactgcaagcctatgaaaaatggcaaggagatgcccagcccacttgggaacacattgttgttaatgcacgcttggcagagctcggccatgctttttggattgcagatgaacataatgcccttgaagaagccgtagagtctcggtctgatgcatcgaaacacaacctggaacgtcccgtcgatcaggaagcgggttcttctgcgtcctttacctatgatggcatgaggctcggggcacccgagtacgctgcgcataagcgctggagcaagccgaagcggccgacctgggaagatctcatcctagatgcacgccaggctgctatagaaagcgcctcggtttcgagtctgcagattggaaaggaaccatcgtcagtctttttatatgagggaaagtcgcttggagatgcggaacgtcaggctcacggaaggtggaggcagctagcccaaccgcgatggcaaaatctggtggtgaatgcgcgtctggcagagctcgacccgtcggtctggattcccgatgagcatgatccgtttgaggaaggcgaggtgcctactcccgccccgcaagcgagtacagccagtaaatccaaccccactttgggtggtcaatctgaatcaggccggcccgaccgtgcacatgagacacaagagacgactcacctgcaatcgccgacacgctcacaattggaaacaaggcgcgcactatatttcgggtcccctggccgggatgcaattcaaacggagagcatagccaactgtgatcgttccgatggcgcgggcaaagttaagcggttgggcaccaaaggccgccgagccgttaacccaattactcacggcgtaaattccagtgtgcaagggccgttgtccgatgaacgtgggcatgaggctccgttctcatcgtcagagcaagttgtccgctcgagaggcgataacattggcacctatggaagtcggaaaaacgaacgagcgcggctggctacggagaccgggaaatacgaatcggagcacattttcggattcaaggtcgtacatgatactttgcgggcgacaaaggaaggccgtcgtctcgaaaggccaatgccggcctacctcgaatgtaaggagcttcataggcaacacgtagggactggaaggggacggacccgacttgtcgggcgtggatggccagatgatgcgagctatcgctcagatcaaaagggaaccctgtcggaccctgtcgcgtccgcggaaggtgtgacagcctcaaatggctaccagttgaaccagctgggctacgcgcatcagctcgccaacgatggtctgcaaagtgaatcgcccgatgggctcaccatgccaattcaagtcgcgacaaccagctacaactataccgtgagccgcgatccagtcctttcaccacccagtaaagaacaagcgtcccaattgctacaccttggacctcgcgggcaaacggaagctgtgcttgcccgcgagacagcattgaccgggaaatggccaactctcgagcgtgagcgtcaagtgtatcagcagtttttggccctgtacgaaatcaaacaggatctggacgccaaacaacttggtgtacggcagaaaaaacagtctctcgctgccgcgttggaccggacagccgctttgataggcgcgtcaccttcgaaagctcaatcgcaggcagcggagggagccaacggcgccgaaccacccgaggaacgacgcgtctatgaccagcgagatcgaagccgcgacaatgcattcaaccgctgacaaagttgttaaagatgatgatcgatggtgtactccgcgtcgacccctggaaagtttgaagcccccccgcaggcccgccacgaattgcagttgaaacacgatattcgttcaacgcatttcgctgaggtgctaggcttcgcgtattcttgatccgcatttggagtgtgatttatgctcgaagacggccagaaagcacatgaacacgagccctcggtccctcatggtgaggagactgcagtttccctgccgaatgacctgttggtggaggttgccaaacatctaccgaccgacgatccagttgaaacggcaagtaatctcacaagctttaaacttgcgagccacgcggttcgggcatcggtcgatgccagcgaagtcggaacgtttcagcggggcgtgaatcgacttggtgcttcaagcaaggcactctatgattatgcagtacctgggaatggctttgccgagtatccgaactatccggagccggatccgactggcgagtttgcgctggcaagccagcggatcagcgctattggcccaactttgaagtttcagtcgtctgccaggaaaaccgagattgtcaatcacattctcaatatgtcggacggcggtgagcaagcggaggcgattatgtcgataacgtcccatttgcagggccttgggagggccgaccaagggcggcttatcaatagagcaattgaatacttcacggaagacgggccaatcaactacgacagtcgccattatgcagtctatgcacttgcagcggcgcacgaccatttggaagttgaacataaggcacgaatcttcgacgcaattgcgaagcgaccggaacttgcgagcctctacgccgaggaacgagagcattcgcaggagcattcggctcttgcatccagatccgaaagtccacgcgagcgaggtggcgataatttggccggcaacctcgcggagatcgaagaaaaaatccgcgcagggttaactctcggaacgctcagcgctcacgaacaaatggaaagagcggaaccgatcgcgggttcgattgagacggcgtacgacgatgcgcgcgcgaatctaatcggttcgacgagggaccgggcaagatctgatgcaagtcgatagcttcaggtctggctgaatattcgaattttcctggaaaagcgcgcctgatttggcggcggtattttattctccacaaggaccaacaaagcatacgcaggaaaggcctacgtcatggtcagtataaataagaaaagtttgaaggaatctcctacagctaacacgcgccattctgatgaacgcctcgttgatcagttgggacaggcctatcttgcagaacgcgaagcagggcagaggcgcgcgcgatttgaagcgccggaggcgttgaaaaaatatgcctccaaactgcaagtccttgataagctcgatgcggatttccgtggcgcgatcgccaacaggcccttcggaagtgaacaactgcggatcgataacccgggagagctgacccaccagcgcggcatgttgaggaagacgaagaaagtcttcgttcgagaccaaacaacaggcactctccggctcagtcactacgagaggtctggctggactcatattcgtcgctatcactacgaccaacgcggcatgctgagcgaaaagcatgtcaaaagcaaaggcggtgacttcgaagaaaaatgggaacgggatgaaaacggcgagctgatgcgtacacggtatgtcgatcggcgcacacttgcgggacgggcattgaatcccatttccgaggagataggcactccttatgagagtggcccggatgacaggctttatcgcgttttaaggcgtcgggagggctctcagcaagatactttcgagcgcgatgacaagggtaatctggagctcattgcgagcaaacggaccggcttttcgatgtcctcgcaaaagtcggcggatcggcaaacatctgaaacaagcattcacaagcttggcgcagcttttagtaaatcatatagatcccggctggataaggacggcaacgagttaggtcgtgatgtctccacacatcgaagactgctcaacaagcggtcagccgtctacgatgaggccaccggcgagctcaagcgcagcaagcacacttttagcaagatatacaaggcggaaacaacatacctgaacgcggatatcaaagaggtctccaagaaaatcctgggcgtcacggtcggcaaaagattgaagacgttaagcgaacgcgaacttgaggctcaaaggttacgtgccgcggaacgttccctccataaacaggcctggcagaatcctccagttaatccctcccggtcacaacgggagactgcgaacgatcatcttggtaacgtactccatcagcgggtagaaccggaggtgacggtcgcgcgtcaagttggatctgtgtccgtcggtgaggatcgccacgctcttgaagccgctcgatcgacgttgaatgaactgcgcaactctcaaccgtcgaatgatagggcaaacttgagttcgccgagagccgaaatttgcgaccgttcaacgaaccgggatcgcaccatgtcaggtgctttatcgcgataatgagcttggtggaacatacgtcgaactattgggcggttccgatgcatgcaagaccgtaccagccatcattttctcacagcatcaatggttcgtgctacagcgattcatgggaaacccgttccatgtccgaaattagctgcaaccaggagtctattgtcttgattgtctcgtcgaagtccacctgccgtgtcgtgcggcccggcagcagcacctacaccggcaaacaaggcctcagctattttgaagggatagcggccgagacagtgggctcgaccgggatttgcatgcatcttctgacggttccgccgggcgctcgcgccaaggcgcatcttcacgcctcgcatgaaacggcgatctacgcgatttccggcgagacgcattgctggttcggggatgaactggaagagcacgtcatcgtgcgcgaaggcgagatgctctatattccggccggcgtcccgcatcttccagcgaaccttagcgaccggccggcgacagcggtcatcgcccgcaccgatccgaatgagcaggaaagcgtggtcctgctgccggaactggagcgggatacctcatagctttggagtggcgattacagcccggcgatggtagactgggtcgctgcatcacgaaaaatattgccgtcgcgaccaaatctctgcgtattgcgttgatgccggacgaagatttcaaaaccgaagccggataacgccgttgggattttgatcggggtcccgccccggttaattaccggaatccgcagaaatctcaatatctctatgaaaacgtgcaggaacccattctgcgcgtgatcgatatcgatcatagctccatcgatttgcgcaacgcaatatcgatttgatgccccgcacaaactaattatctgggcattctgcttatttttctgtcatacgactgtcatctatggacgatagatatcgatcattcgtgatcgatataagtcattttgatgacaggaggcgtgccggtgctaacccaggcggaagatcgtcaagcaaaaatcgtcgagttgttgcggacgcgcaatttcgtcgacatccgcacgctcacggaacactttgatatttcagtcgcgactgtgcgtcgcgaccttggcgaactagaggcagccggccttgcacgcagaacgcacggtggggccgtcaacaccaatcaggtcgcgctggacaagtcgaatgcagctcgtgccgtctggaagcagtccgagaaggccgccatcgctaccgtcgtttcgggaatgattgtcgatggcgacacagtactcctcgacgccggaaccaccgcgctggaagttgcgaaaaaactcattgggcgcaggaaccttacgctcatttcgaacggactcgacatcgttgccgaattgacgcgcgacgaagcgcacagcatctactcggtcggcggtgaatataccgacacgaaccgatccttccgggggccgctggcggagcaatttattcgccagttcaacgtcgacaagctcattctcaatgctgcctcgatcgacgtcgaccgcggactgatctgcacatcgacaccggtaaacgcgagcgtcgctcgcaccatgatcgaagtgtctcgccgagtgatcgtcgtggcggatcactcgaagttcacaaaatccagcctgtcggttactgccaagatcgaggacatcggcgtcgtcgtgaccgacgccggcgcgaagtccatcatcgacgccgcccccgaaaagctgcgcaagaagttcgtcatcgcgaactgaagaccttctatttccatcaacagcctctcgatagcaggagattacagatgctcaagaccaaccgcagaaagtttatgatcggtgcgagcgtcgcggcgctggcatcgacgaccagcatgaagttcgccttcgcagcggagcgccgtgcgcttcggatcggcgtgaacgggcttccctctacactggagcctgtcaacgccatcagcaatgtggggccgcgtatcgtcaatcagattttcgacacgctgatcgcgcgtggcttcttcgaagacggcgcgccaggcaacggcctcggcttggtcccggcacttgcagagagttggaaacgcatcgacgataagtctgtccgcttcaggctgcgtcagaaagtcatgttccacaacggcgtcgagatgacggcagacgacgtcgcatacacgttctcttcggagcgcctgtggggtcctgaagcgatcaagacaatcccgctcggcgcatcctactctctcgaattcgatgagcccgtcgttgaagataagtatacggtcgtattgcggacgaagaccccaagctatctcatcgagacctatgtaacctcctggatgggccgcatcgttcccaaggattattacaagagcctcgggacggtcggattcggtaacaagccgatcggcacgggcccgtacaagttcgtcgaactcgttgccggcgatcgtgtagtcgtcgaagccaacgacgactattggggtgtcaagccgacggcatcgaaaatcacttaccagctcgtcgccgagccggccactcgcgtcgccggattgatcagtggcgaatacgatatcgtcacgacgctgacacctgacgacatggaactgatcaacggttaccctgacctggaaacgcgtggaaatgttgtcgaaaatttccacatgttcaccttcaacatgaaccagcctgttttcaagtcgaagaccctgcgtcgggcgctcgctcttgcggtcaatcgtccgatcatggtcgagtctctctggaagaacaaggcgacaatcccgaatggcttcaacttcccgaactacggcaagaccttcgatccgaaccgtcgcgcgttgcaatacaatatcgaagaagccaagcgcctggtgaaggagagcggctacgacggctcgccgatcacctatcacacgatgggcaactattacgcaaacgccactcccgcattgatgatgatgatcgagatgtggaagcagatcggcgtcacggtggtgccgaaggtcttcgcgccgggcgcggctccgaaggaccaggacagctatattaggaactggtccaacggtcagtggatgacggacgcctgggccacgatgatctgcgagttcggcccgaatggccaggtccagaagcgttggggctggaaggcgccggcggaatttaatgaactatgcgtgaaggtatcgcaaatgcccaacggcaacgagcgcttcgacgccttcaatcgcatacgcgacctcttcgaggaagaagcgcccgccgtcattctataccagccgttcgacgtctacgcagcccgcaaggacgttcactggaagccgatcagcttcgagatgatggaattccgaaacaacctcagcttctcataaccacacctttgcgcatcggcggtgcgcatccgtgcgcaccgctcaaggggagagcccatgtctaagctattgaccgttcgtaacctcgttgtcgaggtcccggtacgaaacataaagatcatcgacgacatcagcttctctctggaggccggacagacgctcggtcttgtcggcgaatccggttgcggcaaaagcatgacctgttatgccgttgccgatatgctcccgcgcggtatcgcccgcacaagcggcagcatcgtgtttgaacgcgacgcggccagaagtaggaaggcagccgacccgacaatcgcgatgatcttccaggatccgaccagcagtctcaatcctctccatacgattggacactatctggagtcggctctctaccgccatcaaggcctgaggggcaacgacgcacggctcgaggccatgcggcttttggaacgtgtcggtatcgatcgcgcgaagagccggatgcgctcctatccacaccagttctcgggtgggatgaaccagcgcgtgatgattgctcacgcgcttgcggcaaaaccgcaattgctcattgccgacgaaccgacgaccgcactcgacgtcacgatgcaggcacagatccttcatctccttgaagaactgaaagcagaaaccggcatggccttgatgattgtgtcacacgatctcggcgttatcgcccggctggccgacacggcagcggtcatgtattgtgggaagatcgtagaaacagcgcccgtagccgagttacttcagcgacctgctcatccctacgctcgcgcgctaatcgactgtatgccaagcatcgatcccgaggatctacaacctccgatccccattccaggttccgttccgctgctcgatagcctccccgagggctgtcattttcatccgcgctgttttcgcgcgagcggcgagtgctcagcccgctttccagctcctgctaatatcggccttgtccatgaggcttcctgctatcatccggtggtcgcatgagcgcgccccttctccaagcacgtgacctgaccaaggccttccgtcacaaaaccggctttttgtccaaagccacaaatcaactcgccgtcaacgccgtaagcttggagctcgcccctagggagcggataggcatcgttggcgagtcgggaagtggcaagtcgactttaggccggctactgctgggcctcactccgcctacaatcggtgacgtctggtttgagggcgccaaccacaaggatcgaaatgctcaggattggagtcaattccgtgtccgaacatccctcgtgcagcagaatccactttctgcccttaatccgcagatgacggtcggccagcaggttgctgaaggcttgttggtgcatcacgtcgctggtcgcaccgatgcttatcagcgtgcggcagcaatgcttgagcgcgtcgggctgtccggagctatgatgaaccgctatccacatcagatgtcgggtgggcaacgacagcgcgtggttatcgcccgcgcgctaatcctcgacccgaggctggtagtgtttgacgaggcggtgtccgcactcgacgtgtcagtgcaggctcaggtcgtagcgctcttacgtacgctctggaatgaactcgacctcgcatatgtgtttatcacccacgacctacggatcgtgcgccatctcgttgaccgtatcgccgtcatgtatctcggccgtatcgtcgaaacgggcaacatcagatccgtttacgagtggccgcggcacccatacacgcgcgcgcttctcgcttccgttccgaccatggacccgacggtccgtaacgtcgagccgccgatcaagggagagcttgatgccgcgaaggtgtcgcaaggctgtgctttccggtcgcgctgtccattcgccatcggccgatgcgagtccgaaacgcccaatctcagatcgatcggtcaacagcaggctgcatgccatcgggcggaagaattccccaagtcaatcacttcattgatcgatttaggacaacagaaggaaatggcctgatgatgggattcatccttgctcgcatggtccgtgctattgttgtgctcgtctttacagtcacgctcgtcttcgtcgttcttcgcttgagcggtgatcccgcccaacagatgttgtcatcgcaggcaggtcccgaggcgttggccgcgtttcggacgaagtggggtttcgatcggtcgattattgaacagtacctaatttatatcgccagtgcatttcgaggcgacttcggcatctcatatgccgatggccgcgacgtctttacggtcatcggcgaacgcataccaaagacgcttgccgtgacggtctcggccttcatattgagcttgctgatcggagtgccggtcggaatccttgcggcagtgcgccgtgagtctgccgttgacaagggcgtcatggctggcgctgtgctcggctacagcattcccaacttcctgctcggcctgatcttcatcttcgttttcgccgtctggcttcgggtactgccgagttccggcagttcgacctggtaccatgcgatcctgccaattgcgacctttgccctctacaatgctgccgtcgtcgcgcgcttcatgcgctcgacactgatcgacgtacttgggcaaccctacatcgctgccgcacgcgcggacggaattccgaactgggagatcatcctccgtcacgcgcttccgaatgcggcgattccgatggtgaccacgatcggcttcatcgccgggggcctactcggcggctccgcgctcatcgagcctgtcttcgcctggccgggtattggaagtggcttcgtgactgccacgagcaccggcgacctctctgtcgtacaggcaacaatcgtgttgttcaccgccttcatggttacgatcaatctgaccgtcgacgtcctctatgcggtcctcaatccgaaaatcaggaaacagtgacatggcgacagcgacatcatcccgctcgtttctggccacgatatcggcgccattctcaagcatgccggccagtattgtcctgtgctgcacatggatcgctatcgtcgcaatcatcggcctgacggctcgatggtcggcgccttttgactatctaaaccaggatccgcttgcacgttttacgcggccgttcttatcggcaagtcatctgctaggaaccgactatttggggcgagacgtcgtcagcaacctcttggtcgcaacgcagacgacgttgacgattgctttggttggttccgttatttgcgcgctgcttggaacaagcctcggttttcttgccgcccacttcggcggttgggtggacaatgcgatcatgagtatcgccgacgcgatggcatcggtgcccttcatcattatagcactcggtgtcttggcggtcttcggctcaagcccactgctgtttgtgttcctggtgggggttttcaactggtggcgatatacgcgtctgacgcgagcattggtcatcagtgccaatgaagaaggttatgcagaggctgcccgcattgtcggtgttccgcctctgcgcctctatctgcgccacgtgctgccgaacatagcaggcccgctcatcgtccagttcaccgtcaacttcccagagatcattctcttggaaagcggcctgagtttccttggactcggtatccagccgccggcgacaagccttggtctaatggtcgctgacggccggaattatctggcgattgcctggtggctggcgaccttcccgggcgcggtcattgtccttacgaccctctccatcagcttgctcggcgactacttgcgcgaccgtctcgacgcgcgcctccgttgaatgaaaggaaagaaaatgaacccactcagaatgacgaaagagacgatacgtctcggcggccaccgcggccatagcaccggcgcgccggaaaataccctcgccgcgtttcggaaggcatttgaatacgccggcccaaaagtcacttgcgaaaccgacctctccatcactgccgacggtgagctcattttgatgcacgacaagaccgtcgaccgcacgaccaacggtcgcggcattgcgcaaaagatgacctattccgaaatctccaagctcgatgccgggtcttggttcagcgacgaattcgcaggagaacacgtcccacggctcagagatgcgctacagctcgcccgcgagttaggtattatctatcagcttgagctcaagatctacgataggaacgacgtcttcttcccgaagctgcggtcgctgatcgacgagctgagctgcgcggatcttctgcagttctcttcgttcgactacgtccagctgaaggccgtaaaggccgcgatccctgaagtgccgactgtcggcctgatgcactcccgtctgatcgatcccgccgccattgcccggcaggccaaccttgatgccatgaatatcgagatctaccactttgccagcggagaggcgcgccaacttcatgaagagggcttcgctgcattctgctacttgccagcagggcatcatgaaaagctgatgcaacacggcgtcgatgttgaggctcaggtggttcaatgggttcgcgagggtcagttggatcaacttctcggcgacgacgtcacgcaggtggcaaggctcagggatgaagcccgtggctgatattcatgcttctacctcgtcagcccgctctgtcgaggccatcgttgaagacatcgcaagggaggccgggaagctggctctgacccatttccgatcgttggaaaaccttccggtcgagaggaagggtcatctcgacctggtaactgaggctgacaaacaggtcgagaaattcttgatcgcccggttgcgggactgctttccggacgacggcatctttggtgaagaaggtggcgaaatccccggcacttcaggtcgtatttgggttgtcgatccgatcgacgggacgttcaatttcgttcgaggcagccagaactgggcgatttccatcggtctctacgagaatcgccgcccagctttcggggtaatccatgctccggtccgggacatgactcttgtcggcggtaaaacggtcccggcgcggctcaacggcaaaccaatcaagcctctgccggccctcgacatgtcacgggcttcgacgggatttagcttccatccctcggtatctacggatgaccggcttgaggttatacgcttcatctcggacgacttgggcatcagcttccgtttctgcggggcagccacgatttcgttgatcgaggtcgcaatgggggaaacggacggctacgtgtcggtcggagactccacctgggatgtcatggctgcgctacccatcctcgccagtctcggtgtttctgacactatcgactgggaccggatcgaactgccgcagaagctccgtttcgcatgtgggagcgaagacttcctaagcaaagtcaggccgttgctgcagaacctgtcagctgctgcctgaccaaatggtagggccaaaagaagcgtgtagtgccaaatgctactcggctcagctggctcccataaaatcaaggcgccgcgccggcaactgtcgcgacgccacgttgaacctggatccgatggcgcatgcttttcgcgccgagttttaggagattatccttgaacccgtcagacccatcgctcacttcgcaacgtcctttaaacgccgtctatgacttcgtgtgaagggaagcggtggtcgtgtcgaacgactaaggcggcgaaaagtttctggcttcccctctctcgccacgcaaaagctggcaaagggcgaagccggggccagtccggcggcatccgtcgcggacggcctcacggacgacttggcggcgaccgactgcgaaatagcggcatttaaagctgaaagaatggctcgcctcgcagatacccgtcgaattgccgtccaccgatcaaacgagagctttaaaatgaatatggacctgctgagacgtactccggacctgcgcgctgtcgcagacgttcgccttatgacctcggaagatggcccaggacgaggacagcggatccttgtggccagagacgcggctggcattgcctttgaaatcgcggtcgaccgtggcttcgacatttcaagcctatcgttcaagggcctgaacatcgggtggcattcgcccacgcagatggcgtttccgtcccatgatcccgactcggaagacgacggccacgcatgcttaacattgcttgccgtcaaactattactgagacggctcttaagctcttcggggcatcacctggatcggctgcggaccagccggactgaaagtccgaagacaaggtcaccggcatttcaaagcgtcgctgcccgagctcaagcgtatcaatattcgtgccctctcgcgcggttccccaatcatgacccgaggtggcttcttgatggaaggcaaggtgcgtaatgtctgtcgagaactacaaggactgcaagccggcaaagctgacgccaaccgaaaagcaatatgccgcgctgtgtttcaggcacgttgcgggttcggaggatcctgtccaactgctgctgatcaccagtcgtgataccggccgttgggttatcccgaaaggatggggtgacgctaagaggaagccgcatgagaccgcccagcgcgaagcttgggaagaggcaggggctataggccgagtccgcaagaaaccctttggctattttacctatttgaagaagcttgacgacaaccggagcgtcatggttgtggtccgggtgcatctgctccatgtgcttcatctcgaggaagaatttcctgagaaagggcagaggatattgcgttggttttcgccgaccgcggcagcggctgctgtacgcgagccggatctgaagtttctgattggcggacttcgcgacgttgctctgcagctgctaagcgcaatgccgagcgtctggtagttgttgttcgaagaaggcttgatgccaccgcaactaacgtgtgccaccgttcgcgtccatcaataatcacgacactgtcgtccgagagccgttagacattttcaacggcgacatcgcgtgtcgtcagttcggcgcagcgtgcgatgcgagcacggatcgtggcgaataccaacgccaaccgggcacctttagccctaaacgaaaaattatcatcgcaccaaatagtaacgtttcgagcagtaggcgctgagccaaaccaaggccggtggcggtaaacacccatatgagcgtgagttttcaagcggtccgcaccgcgatggtacagcattgtctaggcaaaaagacccggcagggataccgggtcttccactgtttgaccggcgattagccgatcgatgaaagaagcctgacgaactggaaaatcagacttctcttacccggtggggccgggtatttcgagattagaagctgcgatggacccggagcacgccagcccactgatcttgcttgacagagtcaaaattcgcgtaggagagggatggctcaatcaacaggttcttgaccgggctccatttgacattcgtgcttgcggcgaagatcttggtgtcggaataggcaagctggaggttccacttcagcttgtcgttgatcggaaccccaacgccgccccagacagcccaatcgcccatgccgcaaagatcgccacggccagtcgggcaagcggtagtgtcgagattcgagccggcatactggttcagcttcttgccgtccgtgttccaggcacccatcaagaaggctgtgaaggcgccgaagtcagcatcgacacgagccttgatagcgccttcttcggcaatcgagtcgtaaccaccgacaaccttgaatccgaagttgccaactctgtaaccagcaccggcaacaacattcggagcgtagtggttagctttcgccttaacccaggcaccgccgtaggtagatgaatccgagccggaattggagtcttcgagtgagaccacggccgcgaagccgttgcctgcgtcgtagttgtaggtcaactggttgagttcggacgggccgtagtagatctcgtcatcgtagaaaacgtcgccggcgtaaccggtgtagaagtcgtaggccgagtccttcttgccgagagtgaagccaccaagattgatgtaggaccacactaggttggtggcagtagcaccgccgtcgttccagtcccaacgaacaatggcttcggtctgtagcggaccgtattcggtatcgcttgcggtgtcgagctgaaggtgcgcacgggtgtgccatttggtgccgagggcagcggtcggactgtagccattgtgccagacaccttccgaccgaacatagccgctaatcttaaggcaggtctcgctgcccgggatgaagaagtagccagctccataggcatcacagatgcggacatattcaagcggctccggttgggcagcaacgactgcatcagcagcatgcacgctcgaaacggcaccgaatgccgtagctgaactcaataatagctttgtaagcttcacgtgaatttaccccctagaaatgtggaaaagcgttagcaattccgctgaacaaaataagttgaacagcttcaagcggagggaaactcacgaaagggacgctactgtgcaagtgatgaatagaaatcaatcgccgtagacgatacgttatttacggatcaagccgctctatacacgagctcgatttaatatcggcgaaactgccacaccaaccgcatgattgttacctacacgtcacacaacttgtacctaattagcgggcgtataataaggttgatctatagtctgtggtcggtttgggtctgatccaaagatcattcagcaacgagagtgcgcgagtgacgaaccaccaatcactgtgaagctcgggcgagcgcattttgatcttggatggatccatccgacgaa

SEQ ID NO: 70 - DNA, 200550 bp, Artificial sequence
  Synthetic Ri plasmid
ggccgcaggatttcgttcgtcgtgcgtgatgagatcgataaatgtttatcgacgaggacaagatcgacgatgcggttcttgcgctgttgtagtgacgctccacaacgagtgttgcgccgtgaaaggctttgactgggccgcgacggaccgcctttgcaggaagggttcggtcggcgatcccgtcaataaatcgaagctattgatcctgacggataaaggtctgcgtcgatcggaggagctattccgacagctgtttacgcgctagccattggccgacggtctttgcgccctccattcccacggcgtagttaatgccggcggggacgggagtgtctactatgtgcaagcacgtcggcgaaccatgccttcggattaatgtcgttcagacgggcggtcgtaagttgaatgagtatgactgccgcatggtcagcgccgcgttgggagccggcagatgtccagtcgcggcgcctcaaggccatcacatgttcactctgtggccagaaggcgtcgctccttgggccatgggaagttcctatactttctagagaataggaacttcggaataggaacttcacgcacaccgtggaaacggatgaaggcacgaacccagttgacataagcctgttcggttcgtaaactgtaatgcaagtagcgtatgcgctcacgcaactggtccagaaccttgaccgaacgcagcggtggtaacggcgcagtggcggttttcatggcttgttatgactgtttttttgtacagtctatgcctcgggcatccaagcagcaagcgcgttacgccgtgggtcgatgtttgatgttatggagcagcaacgatgctgcgcagcagcaatgatgtgacgcagcagggctcgcgcccgaaaacgaagctgggcggctcatcgatgggcatcattcgcacatgcaggctgggccctgaccaggtcaaatcgatgcgggcagctcttgatctgttcggtcgtgagttcggagacgtcgccacctattcccaacatcagccggactccgattatctcgggaacctgttgcgtagcaagactttcatcgcgcttgccgccttcgaccaggaagcggttgtcggcgccctcgcggcctacgttctgcccaagtttgagcagccgcgatctgagatctatatctatgatctcgcggtctccggcgagcaccggcgccagggcattgccaccgcgctgatcaatctcctgaagcatgaagccaacgcgcttggtgcttatgtcatctacgtgcaagcagattacggtgacgatcccgcagtggccctctatacgaagttgggcatacgcgaagaagtgatgcactttgatatcgacccgagtaccgccacctgacaattcgttcaagccgagatcggcttcccggccggaagttcctatactttctagagaataggaacttcggtcgactagataaatttgtgtggaggtatgtttgtttaggacggcggtgatgatggcttgcgccttacgtcccgaaagcagtccacgaagacaattgcaatatcggctgtcttccattcccttcgtggcatcttgtcaacgcgcctcgggagctcagtcgccgacgtttcgcgagttcggtatgcaaccccgaccttgcgaagaaccgcttacggaaccgcgctctatgagaaccgccgggagaagagtttccttgggtggggctgaagtctcgccctttaagcgggcgatcaggtcttctgtggcagccgtcgcgagatccctgacaggttgcgaaatcacggtcaatggcggcgttatagcggatgtccagtcggcgtcgtcaaagcagataagagagacatcatcgggaatcgaaagatccatttcccgaagaactccaaggagaacgagggctacggagctgtctgtggccaaaaaagcggtaggtctgttcggggaaatgcagagcgcacgcacctggtcggcgagattttttgtgtcccagccgccgagaacgataaggttaggagaaatctttatttgggcatcgtgcagcgcggcccgataaccatcgatacgttcccgaacggacgaaatcaggtactgctgctccccttgggcgggggcgttagacactaaggcaatactacgatggcctcgcccagtgagcgacgttaccgcctcgtgggctgcacggaaattgtcgaccgcaaaagtgttggcgtgaagaacagggacccgcctgtcaagaaggaccactgggcagcctctctccgatgcgctaatgagatgctccacctcgctgcttgacgttggagagattatcaatccatcgactcgcttagccagaagaacgcgaacagcgtcccgctccagctcgatatcctcatcggtcgtcgctaggatcacgacgaaaccgtgcgcaccggcggtgtccgtaatagcccgaatagcccgcgcaaaatagagattctcaatgtccgctataaccacaccgatcgttttgctacggccggtcgccatgctctgcgcgagatgattgggcctgtaagccaagctcttcgcggcatccgcaacgagttcgcgcgtcttttcgcggacatagccgtaaccgccaagtacccttgcagcggttgcccttgagacgcccgcaacgcgtgcaacgtcggcgattgtcggagcagcgcccgcgcgatcgttgtctttcatgagctgctcgttcccaaagggaggttcttggcgggtgccattttcgagttccttgtcttcctgcacgaaatagctagctcccctcccgcggacctctgcctcagcactattctgttccggttccgccctatgacgccctaatctgtctcgatcaatcgcgcggcagaaggccggcgtttagcgccggccagatacaacgctcctaccgcaagtgcggagcgagcaattctaagtcggcttcactcagcctatcgctcgcgttattacgctggtgccaatacggataaagcaacggtggaatgctgacgtcgtcgagccgctttcgttcttcttccgatagtttcaattctgcggcggccagattatccttgaactgggcctcggttcgcccgccgataatgacggaggtgacgaccttgcggccaattaaccaggctagcgccacctgagctgcggagacgcctcggccttcggcaatcgacactagtgtatcaacgatcttccacaggcggttttcgtcgcgaatcggcggctctttccagccggcaaactggcggctaccttccggcgccgactggttgcgccgatgtttgccagaaagcagaccgcccgcgagcgggctccagacgagtacgccgaggccttggtctacggaaatcggtagcagctcatattcggcatcgcgagcttcgagggtatagtggatctgctgactaacaaagcgctggcgcttatctttctcactgactgcgagtgccttcatgatgtgccagccggcgaaattcgagcaaccgacataccgaaccttgccctgacgggtgagcgtgtcgagcgcttctatcgtttcttcgagaggagtttgaccgtcccattcatgcacctgatagagatcgatgacatcagtcctcaagcgcttcaggctcgcctcgcaggcggcgatcagatattgacgggagagcccgccgtcgttcggcccggggcccatattgaagcgcgctttggtggcgattagagcgccgttcttacgcttgccgccaaagatttcgccgacaatctcttcggacttgccgtcagaatagacatctgccgtgtcaatcaagttgacgcccgcatcgaggcaaagatcgacaaagcgtttcgcttcggaaacgccaagatcgccgaccgtctttgcccaacccacgccgccgaaggtcatcgtgccaatggttaaggtagaaatcttgaggcctgaacggccaagtagacgatattccatacatctcctccttgtttaatcggaattttatcgattggcgcgcccaccattatccgaggcgggccgaattgattagaagctacccaaacacgctcgagccgcggtcagcgggactgaccgaagtgcgaaagcgggcgaagagctcgcgacccatggccttgtgttacgccatcgcacgtggccggcacaccgccggccaccacctgagtcgcactcatagaccgcgctgcgtctttgataatttcgggataggtgccgtagggctgatgagcgctcaacatgtcattgtaagaagtcacaatgcccaagttcagcgccgttgagccggttagcctcgacttatcagatggggagcaggcggcgacactatgggcgaggttgccgctagatagcgcagcacggtggacgcctttctccctctgcgcctcagcaaggccgagatactctcgacgcgagtgcgcgctgcgctgcggtcggtaacaacttgaataggctcgtgaacagacatctggacttcctacggcacccgatattcgttagatacctggcttcagccagccgccgccgggaagaggcttcagagcctgggcgatcggagaaacttcgccgatataaacgcggggatgtcgcgttacgatgaatgcgacatagtctgcaacgtcttcaggttgaagcaactgtgatcgatcgtcgacgtggttgtcagaacgttgctgcgtgtcgaccgctcccgggcaaatagccgtggccttgacaccaaattcgataccttcttggtcagtggtctgggtcaggccgagcataccgaatttcgaggcggcgtagccgccgaactttgcagaagcaactttaccagcgcgcgaaacaatattgacgatatggccgcttcgtctgtcgcacatatgttgaaagaaggcttgggtgcaaaggaaagtgcctttgagattgaccgccatcatgaaatcccagtcctcttccttgatatttggaatggagttgtggatcgccacgccggcgttgttcatcaggatgtcaacagcgccgaagcgatcgaaagccgcctgggccaacgctgtcacctgagatttgtattggacgtcggtctgaacagccagtgcctctgggccgatcgcacgaacctcggcggctacagcttcgacctggtccaactcgattgcggcgaggacaatgttacatccttccttagccaatgcgagcgctgtggcgcgtccgataccgcggccagcgcctgtaatgacggcagttttaccttcaagtttcatttctatcaccttttaagattcccatcctgggcacagcgcgggtaggttggggcgtggtccgtcagcatcgccaaaacagcgcgaggcatgataccgctctcatatggtaccgctctcatagggaatgtcaagaggggattgggcactgtcgcggtcaattacgaactgtcaacggaagagagggagcagcgagctacgcttgcgtaccggacgtgtatgcccagaccataagtcctaatggataatagaatatcggctcggtcccccgactactgggcgacgctcgctttcaccggaacgccgctgactgaaccacgattaatgagtatcgctggaagcaaggtttccctaccagggcctgaaggaccgccttccaaacggccgatgagactttccgtgacggctgaagcgagttccttgattggctgcgagacaaccgtcagaggaggggttacggcaacagtccagtccgcattttcaaaacagataatcgacgcttgtccgggtattgaaagatccagctctctcagaacgcccaagagaacgagcgcgaccgcgctcgtcacggccagaaaggcggtcggacggttagccgactggcagagcttacgaatttgggcagcgagattgtctgtgtcgccgccgccaaagacagttagcttcggatctatcctgatgccagcatcacgaagtgccgctcgatagccgtcgacacgttcacggacaggtgacgtcagatattgttgcccctcatctgcacgcgaattggagagcagcgcaatgcgttggtgtccatgtgcggtgaaagatgagacagcctcatgggcggcactgaaattatctatggcaacagtatcggcattgagaacgggaacgcgcctgtcgagaaggacaaaggggcagcccatgtcacgcgcgctgacgagatgatccaccttgaagctagaggctggagacacgatcagtccatcgacccgctttgcgagcagcacacgcacagccgccctctcgcgttcgatgtcttcgtcggtattggcgagaacaacgtcgaaaccttttgcgttggctgtgtccgtgatagctcgaattgcgcgcgcaaagtataggttctcaatgtcggcgacgacgacgccgatcgtcttgctcctgccggtcgccatgctcttggctagctggttgggctgataagctaggcgcttggcggcatccaggacgagctcgcgggcctcgccgcctgcgtaaccgtaaccgccaagcacccgcgccgccgtggcacgcgagacacctgcagcacgggccacatcagccaccgtcgcctgagggcccgagcgtccgttattcttcatgatctgctcgcatctacattcgtacgcctcgtccatagcagacaagtaaaacgcaaacaaacctcttgactccgtacccgtaaatgtgagaccgctatcagactgagagcgcgctcacatcacgttatagaaagcgaagaacgatgaccatctatcccaacttggtttctcccgatcccgatttccgcaacatcatcgaggctgccgtcgcccagcgcgaacgtattgcccaagtcgccagggcagcagcaagcggagctcgcaaccttttcctgatcggttgcggcggctcgtacaatgacttctccgcagtgtcttaccgatgtgaccgcagcgcgaaaattcccacattcctcttcaacagcgaggagttcaatcgtcgctcgcccgtgcttctcggcaaggattccgtcgttcttgttgcttctcacaacggcaccacgaaagagactattgaggccgctcgccgctgccgcgcttccggcgcacgcgttatcggtttcaccaagaatgaaactactcctctcgccgcggaatgcgacgacgtgttcacgtacaccagcgaccggacaatcttggcgccgaagcagttgctgatcggtatgatggtgacggctcttctaagggaaaccgacgcagatttggactacgcagcgctcgaacaggcttatgcagccgtcccggctgctttcgaaaaggcaatcgaagaagcggaagcaagtcttcatgagattgcggttgcttttggcagcgaagctttgacctatgtcctgtccgccggccccaaccagggcgcaggctatggcttcgccatgtgctatctcatggagatgcagtggaaacatgcctcgtggttcaatgcgaacgagttcctgcatggagcattcgaagtcgtacagccggccacgcctgttcttctgttcaagggcgaggatgatacgcgcggcattatcgatcgagtggagaccttcctcaacaagaacacgcagcgttgccgcgtcgttgactcgaaggactacagtcttccaggcgttccagcatcgatgcgtggagaaatcacacctcttcttctgtcgacattgtcgaggcgtctggccgagcactatcaagctgtcacgggtcatgacctgaccgatcgccgctacatgtttaagacaacttactgaggcactcaaatgcgtgtttgtggcatcggcgacaacgtagtcgaccgctattttaatcagaagttgatgttccctggtggcaatgcggtcaatttcgcagttcacgcccagcgcggtggcatgagcgctgcttacctcggtgttatcgggacagattctgacggcgatctgatccgatcgagcctgcaggcggaaggcgttgagctaaagcatcttcgtgtgaaagaagggccaaatgccttcgcaaccgttcacatggacgacgatggcaataaccgcaaatggggcttgtgcgagaaaggcgtttcgatctttaatctcgatagcgccgatctcgagtacatcagcggttttgacttggttcacaccggtgagaccagtcagttagacggtcagctgcccgaaattcgggagcgggtgccaatctccttcgacttctccgaccgggatctggattacgcagcgagcgtgctgccctttgtaaaaatcgcagccttttcgcgggccggcgccgacgaagccgaaatcgcctgcgtcctggatttcgcccattcggcgggtgtcgagctcgtaacaatcacccaaggcgcgcgaggggcgactgtatctcacaaaggcgaggtcctgttcgccccggcagttgctgtcgatgccgttgatacgcttggggcaggagatgcattcgtcagtcgtcttgcatgccgcatcctaggtggtgtgtcgcttgccgcagccgctaacgacgctgctcagtacgccgcagttatctgcggaacacagggcgctttcggccatgcccggcctattacacgagaaataccggcgtaacagtaaagtgttcgaaagccttgcgagtaccaaaagaaaattggggaacccgatgcaccaagacccgaagatatctaaactgaaatttccgtccgacgcagatcaccgcagtcgcgtcgagcgcgcacaagcagcgatgaagaaggctggcattgacgttcttgctatttccggtttcgattacctacggttcttcaccggtttgaatggtcttccgatcggcaggccgatctggttgatcatccttcgacaggggtcaccgactttcgttgctccccgcagtgaggcgaaggaaatccgagcaaggtgcgcaacgccggtggcggctgaatgggtcgaatgggaagagccgatacccgccccgatgtcccatcaagacgcactcgcgaagtatattgcggagatcgcgccggacgcgcagacgatcggcgtagacttcaactccacttgggcgtcgaatatcgaactggtaaagcaggttctcggcgctgagcgcatcaaagacgctacttcgatgttgcgcaccttgctcgcatttaagaatgccgtcgtcatcgacggtattcgtcgggccacttccatcgtcgctcatcagtatgttgcagcccgtgaagctatcgctcccggtgttccggaatgggaggttacgcttgcttccgttaccgccgcgatcaagcgaagcgccgaattattgaatgaggatgtcgagcagccgcggttctggccgcaccagatgaacatggtagcgagcggccccgaacgtactgctcgctgccattgctctggtggcggtcggatcatgaacgacggcgagaatgtacagatttgcctttgtggccaggttttcgccggttacggcgtttgctttgatcggcctattgccgttggttcgaagcctcttgctgttgagcttcgccgggtcatcgacgctgctcgtaaggctcaagaagccgccttggcaacaattcgccccggcgtggcagcgggagatgtccacgcagccgcggtggaggtgattgagcggggtggatggcagagtcccttcctgcatcggactggtcgcgggatcggttactctgactgggacgggatcgaactcaaggccgactcctctgtcgagcttgaggccggcatggttctcagtgtcgagccgggcatctatgtcgacggcgttggcggggcccgctttggcgacaccgttcttgtgaccgaaacaggatacgaggttctgaccccgttcgagcttggcagggacatctgatgaccgaccagccgcaccccgccgtatccttccagggagtgacccgacgttatggccctgtcactgccgtagacaacctgagcctcgatatcccgcaaggggagtttttcgcgctgctgggctcgagcggctcgggcaagacgacacttctcatgctcctagccgggttcgagatgccaactaagggcagcgtgcttatgtcaggtacctctattacagaggtgccccctcatcagcgagaaatcggtgtggtcttccagaactatgcgctgttcccgcatctgacggcagccgagaatgttgcctatccactcaagatgcgaggcgtcgcgcgcagcgagcgggaggagcgagtgaaggcagctctcgatctcgtcaatctgaccgaccgcggggcttcatatccaatacagatgtccggcggacagcaacagcgcgttgctctcgcgcgatcccttgtcttcagccctgctatcctgctgatggacgaaccacttggtgccctcgatcgaaggctccgcgaccagatgcagcaagagctgaaacgtattcagcatgaactcggcatcacggtcatttacgtgacacatgatcagtccgaagcgatggctatggcggatcggatcggcgtcatggctgggggacggcttctgcaggttgccgatccagagaccatctatgcggctccctccaaccacttcattgcgcggttcatcggagactgttcgatcctgcgggtcaacgctacggacgggggcaggggatacgacatcgcaggtgcaaggcagtcattgccgtcccccgcaacagagcctttcgatattgtcgtgagaccggagaatgtttcgatccgctcgccttcgaaagtcctagcagaatgtacatttggtgtttcggctacgatccgcgagatgacctacctgggagcgggttggcgtgtcgcgttgcaactatccgacgggcagtcactgcttgctaacgtcatgcgtggggatgatctcgccggaagcttggctccgggcgcgtccgtaatcgcgcagtgggcaccagcgtccgtcgccgtacttccgactgaaggatgaacctgaggcggaatatctgaagtgggaaaacccacaacatccagaggagaaaaacgatgaaatcgaacaaattgtataagcgcctctctacgactttgcttgctgccgcgggtgtgatcttcttggcgggtgtcgcgtctgccgatgacctcgtaatttcctcatacggtggctctttccaggatgcccagacaaaggcctacttcgagccatacgccaaagcgagtggcgtcaaggtcaccgggaccactggcaccggatacgccaaggtgaaggcaatggtggaaagcggcaacatcacctgggatgtcgtctccgccgagagcccagcctttgcaaatgaagtgaaggatggtcttcttgagccgatcgactattcggtcgtcaaggctgataatattccggaaaatttccgtaccaagtacggcgtcggctacatggtgttcggcactaatctcgcctggagcaaggacaagttcccgaacgggctcaccccagctcagtttttcgacccgaacgtgaaggggcggcgagtcttgccgtctgatgcgacgtactcgctcgaattcgcgctgatgggtgacggcgtgaagcccgccgatctttatcccctggacgtggaacgtgctctcaaggtgatcgaccgggtgaaggaccagatcatcggctacaagggtgcctcggatatccaagcgctcatacagcagggtgaggccgacatggtctatgcgggcaccggccggatcaaaaacgccatcaaggccggcgccaattggtcgtatagctgggattccgcacttgcagataccgagtattgggctgtgttgaagggcgctccacatgctgccgaggccatgaaatttatcaacttcgccgcacaggcggaacagcaggctgaactcacgcgggctattgcgtacggcccaaccaatgtcgatgcgctgaggcttcttgatccagcagtcgccaaggatctgcctctttatccggcaaacgccaagatcggagccgttctcaactcgaagtggtggaacgacaattacgaggccgtgaaggcccagtggtccacgttcatcatgcagtaacatcgagacagaggaggaaagaatatgacgcagaagagacgagtaaactgggggcaaacctttttgctcgctccagtgttcataatcctcctcctcgctttcgtcgttccactgttcgccattattccccaggcgttcggcggtgatgccggcgcacgtttccttcggatattcacgggtcccgtgtacctcaagataatctggactacggtgcgcatgagcctggaggcaactgcgataacgcttgtggtctcatttcctctcgcctggctgttgagccgggcgactggggtgaaagctctactccttgggttgctggtgctggttccgtttctaaccagcgtgcttgtgcggaccttcgcttggattgcgatcctaggtcaacgtggtcttgtcaatgggacccttcttacgctcgggctgatttcggagccgctcccactccttttcagtgaacctgccgtcgtcctcgcattggttcattcttccatcccgatgatggttttttccctcgttacggtactccgccgtatcgacggacgcattttgctcgcggcgaacacgcttggtgccaacccggtacgagcctggttgggcattgttgttccgctcgcaatccggggcatccagtctggcgtaatcatcacgttcctcttcacaatcgcaagctttatcgcgcctgcgcttttgggtaatcaacgccagcaaatgcttgcgcaggtgatccaggcggaaatcgagactggcgctgactggcctttcgccgcggcccttggaattacgctcgccgtggtggccacgatcgttgttgccgctctgagcatggcggcacgattgttgtcgcgttggcagcgtcccggccccttgccggacgagaccctcaaacggaaggcagagagagcggacactacgctactacgccggagggtagcgttgccgaccaggcgccctgtatcgtctgcgatttggagacttggcgctaggctggtcgagccggcgtatctcaccgttatatcagtgttcattctgctcccgttgcttatactttttcctgtatcgtttagttcggcagacgttcttatcttcccgccaccaggctattcgctgcgatggttcgaggcgattctgagtagccctgaatggatcgcagcagcactcacaagtctccggatcggcgccgtgacctgcatcctaagccttcttctggccacccttgcggtcctaggcttcggccgccatcgctttctgtttcagggcgctctcgaggcaattgtacagtcccccctgagcgtgccagcggtcgtcttcgcgcttggagcttacctgacgttcgcgcgggtggggctggtggacacagaggcggggatcatcatcgctcacacggtactcatcttccccgtcgtatatctcgtggcatccgcgacgtatagctccatcgatccccgtctgtcgctggccgcagcgagccttggagccaatccatggagcatctttcgtaccattgtctttcctctattgcttccaggtctggccatcggtggtctgctggcaacgctgctgtcgttcgatgagtcggttgcgtcgatctttctcagtgacctttcagtcaagacacttccgagaaagctgtgggaagggatccgcttcaacacgagccccgagtcagcagccgtctccgctcttctgcttggcgtgacatgcactgtgatcattgttggcatggcagtcgttctggggcgcaagagagttgcgggtggaccgagcgctatcgcggtgctcacaaaaactaccgaggaaggtcaatgatcagtttatcgttcttcgtgcctcccaaggcgacatggctgccgtcggaattcgccggcggcagcccctggataacgagttccttcacattggttcgccccggtgattgctgaagtcacgcacgcagacacgataggaaacgcagtggaaagaacggctatggaaacgatcgaggaaacaccaagccttattaattattatcgacctcttcgccttaaagctgtggtcgctgcgacgtcgataaagggcgctggaccggaagacaagcttccaacaaatggacaaaatgttaacggggcaccggacggctatctggatattcctttctccgactgaaattacttgatctgaaaatcagtgcgcgggacccgcctatcggtcgagcacctgcggcggaccataggcaatctcagtcagggccgtttatcgcgattacgaggagtggtgccgtatcgaggagcgccgctcatgaggtggaggaatggcgagcatcgacacttttcaccggcgaccgcattcgccggagggtggcgtttctgcgatcgaagaagctgggggcgtggcgcccccttctgagcaaaggggagccgaatgggacatctaaaacttgttcacaacaccgctgcattgacaaggatactctcggcagcagggctttttggcacgttagtcgacaatgttctgtcgcgttacaatatacgaacgaaggtgcttctgttcgtccttcccttgatcataagtatatcggcagtcggctttacaggcctttatgcctccggccttcttcagggccgaatggaaatatccaacggcattttgcaatcgctgagtggcttcaagaatctctatgcgtccatggacgatttcctgcggagccccagcgacgcggcgcgcgacaagctcttggctgatattggctctcagaaggatatcctcgcagcgacacttactcagatcgggccgagctctgaaggccatgacgatttggctgaggcgacgagcaagacatttggcgtctcggctattgtcggcaaactttgggcgttgcatcagcaggaaggagatcttcgcgctgcactgaaaagcgagcaaagcgccttaatcggcgctcgcttcaacgtgagctccgtgtcgcagcagctgcaggactccacgggagatagcacggcagaggcgacggccaatctgcccatccttggaagcacccgccgcctggaaggttcgatttactctatgcaattggtcctggccgaattcacatcgggtaccgacaaggacaatctgattcggctgcgcagatcgcgaagcttggcataaatatcgatacgttagagcagagcgcaaaagggagagagctggccggggatgtagtcgcgcccataaggcctatgatcgcttcaatgcagtcgaatggcgctaagctggtgggtgggcaccattgaaaaaggcctgcctccggtgggaatctcaacgtaagaccctttccgaaattgctctccttgagggcaaaagcctgatcgacatcgagctctgccttgagcgtgcgcttgtatcgcttgatgcaaaatcgttagaagaagcaattgagaaggcggagcttcaaaagcgggttgaataaggattgcgccttgagcgctccaggcctaacagcgcgccgagaactttcgtttctggctgcttcaccgttgcgaatattcaccggtgtcaccttcgatcggttcgaccatcgttcgcacgccgcctactatcagtcccataaatccgctgatcacatgtcaggtggattgggtcctttcaagccggtttcttcgacacaaatggccgggctcccaggcaaaaaaacggtgatttatcggcttaagcccgaacgaactaacgaggtcgaattcccgatgtttgcttcagactccacggtcgcaatttgcaaaggtcccacgatgcatatcattcaacaatcagacctttgagaccgccgaagcggcctgccgcttcgctcgcgcttcccgtctgccttcaatcttatcgattgccggcagtagcgttcgttggcaccacctttcatccagcctcgtgtcctccgcgaaatgtttgagtatgtcgaagacgtcggtccctgtgacagagtgagcgttgcgcccaaactggtggctcctcaggtagcaaaacagatctgaaaggcaatggatcgcttctttgtgatcgtgtcttgtagtgcatgaccgatataggtccgaacaacccgccacctggcattcatctgacggattgcgatctcgtcgcgtctttgtgttgccggggcataatgttcccgatgcggcttttcaggcacagcacagggtgcatcacggccatttctatggtcgagcgtgttcatttcgaagcatgatggtggttacgccgtcccgaaattcctcgcgtttgacacctatgatgtcatggaggaagtccacgataattggacggccgtttacattcgcttcgacaatcgcagtgcttggcgaattcatattgtctttatccggatgcatcgaaaaactcgggaagctgctcgatctgggcgtcgtgaaagtctgctgacaaaacgagaaactatgttgggcttctgatggtctcgttcgattggcggtgtccgcgtcgaacgcgttcgaacggctcaatcccaacggcaaggatggtggagaatggctaggccttggccgaaaaactaaagcggtcgcgagggcacgtttcatgggaagctcgccacatcgcgttcaaccgtcgcttcgacaccctaggccgtgtggactcttggggttcccaccgttgagcaaatcagattcaagactgtcttttgaaggcagtcatgggagtttcggatcgtcttgtccttcgggatgaacagtgggagcggctatcagcccacgtcattggcgatgagcgcacgcgcggttcgtcccggccgcgacaaccgcatgttcttggacttggaagccgtgctttggattgtgcgtaccggctcgcccaggcgagacctgccagaggtgttcggcgaatggaacagcgtcttccgccgtttcagccgttggagccataacggcatctggtggcgcatattcacggcgatgtcggtcgatcggactacgaatacctgaatgtcgattccagcatcatccgagcccatccgcacgccgccggcgcaaaaaaggacctgaagatcaggcccttggccgttttcgcgggggaactgagcaccgaaatacatacggctgtgcgtggtctcggatgcccggtccgctgcgcgcttacagcaggccagaagggtgatgcgccacaagccgatgccctgattgagggcctgctgccgacatcgtcatggccgatacatagtgaccgcctgcgcaaagccatcgcggacaaaggcactgtgtcggtgatccccaacaatccttcgcgcgcccaaaaatatccgctggacaaacacctctacgcccagcgatcatctgatcgaatgctgtttctcagagctcaaacagttccgaagggtagccacacgcttcgagaaaaaccgccagaaactaccgcgccatcatcacaatcgcagctatcgtggatcaggtaagtgtccacacgacctaggtgcatccctgcacggcgacacaagcagcaccatgcatccaccggttgccaaacatcagatggtggcgggcagccggtcgagaaacttatccagcgtgatcgggtactgacgtacccgcacgccggttgcgttgtagaccgcattcgcgactgccggcgcgacacctgtcagcccgagttcaccgacgcctttcgctttaacgggagagatagcaggatcaacttcatctatgaatacggcgtccagatggggaatatccgcgtggatgggcacctcgtaaccggcaagatcatggttgacgaagaagccaaaccgtttgtcgaccgccatctcctccatcaaagcagctccaatgcccatcgtcatcccgccgatcacctggctgcgcgctgtctttggattcagaattcgaccggcggcacacacggcgagcatgcggcggacccggatttcaccggtgaaggcgttgacgccgacctcgacgaaatgcgaaccaaaagtctgaatcgcaaactgctttgaaagatccccgaactccatactgtcctcgacgacgatgtcgccatcggcggaagcggaggcaatcggcacgcttcgatcgcctgaacgaacctcgccggcgatgaactcggtattcgcggcgttgaacccgagacgctgggcgacctcctccctcagtttcatgcaggcggcaaagacgcccgctgtgaccgaaggggctccctgctgccctccggagccgggggtctcgggaaagatcgaatctccaagctttgctacgaccctatgaatgggcacacccatcatttcagctgctgtctgttgcacgatcgtgtagctgcctgtgccgagatcggtcatgtctgtctctactgtcacgacgccgtggcgatcaagacgcacacgagctccggccttggaaatcggcgctccgcggatagcgcccgccatacccattccgacgagccaatggccatcgcggactttacctgtctgcaccttgcgtgcgctccaaccgaagcgttcagcgccggtacgcagacattcgacaaagggacgggaggagaaagggcggtccgcgttttccgggtcgacctgcgtatcgttcaggatgcggaactcgaccggatccataccaagcttctcggccatctcgtccatggcgatttcgagcgccatcagaccaggtgcttccccgggcgcgcgcatggcgttgccctcggcaaggtcgagcgtcgcaagccggacacgggtcatgcggttcgggccagcgtagagtgcgcgcgtcgaaagggtcgttggctcggttcgcccaccagcaagattgccggaccaactctcgtgtccgaccgccgtcagttttccgtcgcgcgatgccccaagccggatccgctggatggtcttcggccgatggatcgtcgtgttaaacatgagcgaacgctggagcgcgatcttgaccgggcgccgaaccattctcgcggccacggccgctagcaccaggtcaatctggaccgtacccttgccaccaaaaccgccaccgatgaaggacgagatcagccggacgttttcgcggggaatgccgaggataagcccgagatcgcgggtaccccaattcatctgctggatcgaggtccagcacgtcacccggtctccctcccaagtcgcgatcgtggcgtgcggttccatcattgcatgcgcctggtctggaacggtgtacgtctcgtcgaccttaatatccgcattggcgaaggcttggtcgaagtctccgacctgcgtctcggttggaccgccaaatggctgctgctgcgcaaccggagcgctgtccagctgcgcctcgagatcgaattgcccttcggtgcgcacatagtcgacgcggatcagcgaggatgccgcgcgcgcctgctcgaaggtctcggcaatgaccacggcgacaggctggtggtagtgatcgacgtcgggcgcggcgagcatgcgctgaacgtaaaaattgccgacaccaagcgggccggcattgcgataggtaacaacggcaagcacacccggtgcggcctcggcccggcgcgtgtcgatcgacgtgatccggcccttggcgatgccagccccgagaatgtaaccataggcaacgttcggcgcgacgtcgtgatactcataggcgtaggtcgctgtaccggtcgtcttgagcctcgcttcaaaccgatcaaccggttggccgactatacgaagttggtcgatcgggttctgtcccgcaggtgtctcgaatttcatcggtcagcctttcgcttgcgccatgacgtaggcgagcgttcgctccaccaaaggcactttgaatgcgttgtcgtgtgtgggctgcgccccgttcatcaatgcgtcggcgactgccccggcaccacgcgggagtgccgcctcggcaccctcgacccgccacggctttggagcgataccgccgatcgctacccgcccgctgccatcctcgtgaatcaccgcagcgaccgagaccagtgcaaaagcataggaggccctgtcacgaaccttctggtagaaatgacgtccgccgatcggcggcggcagcgttacggcggtgatcagttcgccgggctcaagtgccgtctcgacgtgcggcgtagcgccgggcaggcgatggaaatcggcaataggtatcgccctcgtctggccatccaggcgaaccgtttcaaccaaagcgtccaacgcccgcaacgcaacagccatgtcgccagggttggtcgcgatgcagtcggcgctcccgccgatgacggccagctgtcggctgactccggcaatcgcggcacagcctgaaccgggcacccgcttgttgcaggcctggttggtgtcgtagaaataggggcaacgggtgcgctggagcaggttaccgccggtagtggccttgttgcgcaactgcccggaggcgcccgcaacgatcgcacgggccagaacgccgtagtcacgccgcaccctcggatcggaggccagccgggtgttggtcaccgccgtgccgatccttaacccgccttcggcggtttcctcgatacggtcaaggccgaggtcctgaaggtcgaccagatggcttggcgtttcgatctcgagtttcatgagatcaagaagattagtgcctcccgctatgaactttgctcctttccgccgcgccacgatcctggcggcatctaccgtgctcgtcgctctctcgtaggtgaactccctcatgccgggctcctcgcgacttccgccatggcctcggcaatgttggaataagcgccgcaccgacagatattgccgctcatccgttcgcgcatctccacattggtggtttcgggcgaagccgtcaggtcacccgtcatatggctgggaataccagccttgatctcgttgagaacggcgacggctgaacagatctggccgggcgtacagtatccgcactgatagccgtcatgcttgataaaagctgcctgcatcggatgcaaattatccggagtgccaagcccttcgatcgtcgttatgctgtcgccgtcatgcatgaccgcaaggctgagacatgaattaatcctcacgccgttcaccagaaccgtgcatgcgccgcattgtccgtgatcgcaccccttcttggtcccggatagatgaagatgttcccgcaacgaatccagtaacgtcgtacgtggatcgagctccaatttgcgatccttaccgttcacccgcagggtcagcggcaatttgcgcacatcagtcacgcttctgatcgtctccgcctgagcagcgccagcaaccaccggaagggccacggtcaccgctgacagaagcacatcgcgccttgttaactggaggtttcgttgatctttcatcggccgtcctctcaaagggttttggaaacctcgatcttttatgcgccgggcaaatctcgccgttgctttgcatggttcatgtctggagatagggggcagagacgcgatgattagtgcgtcaaactcgatagagtttatgaggcctgagaataaaagaagttgccgcgaatccatgtgctgcgcgagacgcaagcatattcccgccgatcgtcggcaaaaatcctgaagcgtgcgggcagacggaacctgatttttgaccgcctttatcgtgactcgaccgggcgtgatggggggcagcccatccaatcccgcgtgatcttacccaagcgaaagccccggagagcgtcttaagtccatagcgatcaggcgaaaaagtgcggcgagaattccggcgccgcctcacgatcagaaagctgtcagccaatgacgagcgacctgcgctgggtcaaccagacgatcatcgccaaggcgatcaggaccccgccgcccgtgacgacagcgacccagctgccgcgttcccacaaaacgcctgccatcatcgaccccaccgcaccgccgatgaagttacaggcgacgaaggccgtgttcaggcggctgcgggcgccagggtcgacggcgaaaagtctcgattgattgagaacgtttgtcgcctggatcgcgacatccaggagcaggaccgcgacaagaactggaatgatatgcgttgaaccaaagcccgcgatcacgagagagaccagcgccagagcaagcgcggcgcccgtaccttcgaccgaccagccccgatcatggagcaagccggctcggcgggctgcaagcgcgcccgcaagaccgacaaggccgaccagaccgatcccgctgactgaatagccgaaaggcggcgaactgagaaggaacgtcagtccggtccagaatagcgtgaagacggcaaatgcgcaggaaccgatgaccagcgtaatttgtacgagacgatgttgacgcacgaccgaaaagaccgaggtcaacaatttgccataggaaacggcaggcctcggcttctccgccgggagagcccgcaagagaaggatcgcaagcagaatgatgaacagggccgccgcaacgtagattgcccgccaaccgagggcatcggcgagaaagccgctgatcgtgcgtgacaacaggataccggtgatcagtcccgagacgattgttccgaccacccggccgcgctggtcgggctcggcaagatcaccggcgagaggcgtgagaagttgtccagcgaccgtcgtcaacccgacggctgcaagcgcgacgagcagagcggcaaagctcggtgcaagcgcgcacgcgataagcgccactgcagaacagatcatgatggccgggatcaagcgccgcctgttcatcgtatcgccgagcgggacgacgagcagaatgccgagcgcataaccgatctgtgtgactgtaatcagtgtgccggcggcggcgatcgagacaccgagcgatccggcgatatccgacagcaagggctgggcccaatagagattgccgaccgccgcgccaccggaaatcgcaaacaacagcgtaagcgcgggcgacattgcggtggacgctggagtttcagagtacgcgcgcgacatggttcgttccttgaacagaaatcgaggtgcgccgaccttgctggctcacctcgtgtttttctcagcaattttcgttattgacctgcaatcaggaccgggtctcagcttgcgggaccttcgacaatatagacgcgcgacgtcgccgatttgtgccggatcggtttgagtttttcatattcgggcgagctgtaccaagcctttgccttgtccatgctgtcaaaagcgatcacgaccatccgcccgtcgaaacccgagccttcgagagaagcgatgtttccgccaccccggacaatgaaacgccccccgaatggcttgaatgtggattccacctgggcgctgtatggcttgatcccctccggatcagtcacctggaactccgagatgtagtaggcaggcttcacaccgggagccggctcctgggcgctggacgctgacaacgtggaaaaggtggcggcgccaagtccaaccaagagtgttgcgacacgagctttcttcatctttggttccttcgtttcaagagaggtgaatcgacgttgtcctggcttcaccgctgcttcgcgctgagctggaaattgtccgtttcgaacagcttccgatcgaggatcatgtccttggtggtggcgacctaggtcttgaagtgcgcagagtcccggtgagcctcgtaagcagcgttgtccgcatacatttcgaagaagcgaaggtggttcggtttatccttgatcgaaacggcatagagcgccagcacccctggctccacccggatcgacgtcgccatctcgactttgacggcggccgaataggcttccatctgcgccggatcgatttccaggtcggcgatgcggaccacgggactgttcgcgtcctgagccttcgccgaatgacccgccaaagttaggatgaccaccgtagacacaacgaaaagctgcttgatttccatggaacgctcctcagttggtcacgaccggtttgcaaacacatccttgaccactggcatggctgagaacacacatggccagccgctgtagaaggcaagctgggtcagggcttcggacgcctgttcctgcgtcaggccgttatccatcgcgcggccgagatggtaggtgatctgtgcgacctgaccattcgcgataagggctgcgacagtgacaaggctgcgatcccgcggcgccaggccggggcggagccaaaggtttttgaacaggacctctgcggtatagtgcacgacaccggcggatacatcgccgaaattagcctgaacgccagtcgcgcgctttgcttccgcctcctcgttcaaaggaagaagctgcggtgacgcaccgggcaactgatcggcgccgatgccacgttcaacaaagatatccttgacgatctcgacagcgaagaaggcattggaccatccagcgtagaaggcgagatgcgtcacgatctcggagacttccgcagccgagacgccactgtcgagtgctttgttgacataatgcggcaaaccgatcgtctggttacgcgcgatgagtgctgcaacggtcacgatgctgcgatctctcgcagacagtccagcgcggctccagagatcgccgatgaccgtgttttcggtataggcggccaaggccggcgaaacgctgcgaatctcgtcaagtgtcagtgcgggatggtcattggttagttttgccatgatgttgatccagtcggttcacgagtttaggggtgtcactttgatcgttgctgcgcgggcgcgcgcactgatcatcgggttgaggtaacggctcttggcgtatttcgcgcggtaggcatcgtcgatacggtcgttgattggcccttcgacaggcgcgaattcgacgtctttggtcatgccagcgaccgacacgcggccggccttctgtgtgactgctgactggtaccagcgcgatgcctgcccgtgatatcctcgtacatagagggcaccatcgacaaccaccgaccaaatccatgtcggcgtgccgtaggtactgccgtcttcgcgaaacggggaaatgtggagatcgtccgatacggcgaccttgccgagctcctgatctgaccaagccatgagaaatgccttccatcgatttcggggtatcccgtcagcaaatactccagggatcgccacgagcgtgatcgatgcatggaatatagtatctagttttatttcgattaggcgctaatatctcattgaacttatatcggagatcaatgaatgcggcgggaagatcttggcgacctgatggccttcctcaccgtggccgaggaacagagtttcacgaaagcggctgctcgtctgggaacatcgcaatcctccctcagcctgatcattcggaggctggaggaaaggctcgggcttcgtctcctgacacggacaacccgcagcctcgccccgacgccggcaggggagcaacttctttcgaccctgggacccgccttggggaatatcgatgcgcaactctcggcgctgaccgagtttcgcgacaaacctgcgggcaacttccgcatcaccgccgggcaacatgccatcgacactgtgatctggccgaagctatcgaaattcctttgggactatcccgatataaaggtcgagctcgtggcagaatccgccctgacggatatcgtcgcggaacgcttcgacgccggcgtcaggctcggcgatcaggtcgaaaaggatatgatcgcggtagctgtaggaccgatggcccggatgattacagtggcggcgcccacctgtttcgaccagctggctcccccctcgacaccgcacgagctgacggcccaccgttgcatcaatcttcgtctgccgagctatggtggcttttacgcgtgggaatttgaaaaggatggtcaagagctgcgggttcgtgtggacggacaggtcgcgttcaacgccgttccccagaccgtgatcggagccttggatggctatggtatcgcgtatcttcacgaggacgcggttcgtgagcatttggacagcggccggctcgtccagatactggcggactggactccaccgtttgcggggtaccatctgtactatccgtcgcgacgccatccatccccggcattttccatgctggtcgatgctctcaggcatcatccggcagcgtgactggttcgggcttatgaagtgggggagggatggcgcctagctcaaatttgccgatcagcgtttgagatgcgcatggcgtgcatcttgaactccaacggcagggacgatgggtcattggcgggttcgtggttcacggcgaacatcggtggacgagatgttggcgctgtgccccgaatgttgagcacgggccagatgagacgcggctatcataaggggcttcaaggggaagaggggaccgagttcgaagcgctgcctacagtcagagcctcccaattctggtgcgcaaacttcagtttttcgccgtcgtcgagagagggcccttcgacgaacagccgggcgtcgtttcctggacgatattggtagggatagtcagtggagaacaagatccgatcgacgccgaccgcatcaacggcctggcgcagataggcctcattatacatgccgcttggggtcagatagaggttgttgcgcacgtagtgaatgaagggatgcttcaatcccgacacgcgatcgagcatcactaggcgctcgagataaaagatgacaagctcgccccagtggccaaggatcacctgtaggttgggatgccggtcgaagacgccggccagaacgatgcgaacgaactgcatgccggcttcataatgccaaccaagtccgaacgtcgaaagcgcgaggtcgaccggcgcgccgaagcctgagtaataggcttcgcgaacactcgattgagggatttgggggtgaatgagcagcgggacaccgagttcggcggcgacggcaaatgtcggcccgaagatcggatgatccatgcttttttctccgacccggccatacagaatggctcctttacacccgaggtgctctacgcctcgctgcaattccctcgcagcggcatcagcgtcggcggatggcagcacagacagtgcctggaagcgggatggatgggtcgcgacgacctcggcgagcatgtcgttcgtacgacgcgcgagatcgacgccgtgatcaccgagattgctgagaccgggcgtcgtaagcgacagcacctgcacatcgaccccggtctcatccatgagcgccagccgcttttcgccgatatcggcaaggcgttcttcgatcacgccacggttcagcgctaaggttccgtcatcggcgccaggggtcgtgttccaggcgtttttcacatcatttggcagcacatgctcttctatggcgataatcttcatagtcggctccaattgctttcgacgccattttgccaggcgcgcgacgttcgggcggcgatgagcgagcagtgccgcccctactatatgagaactcggccgatcagcttgcggctgtgagcttatcgacgattgccttgccgacgccatgcgccgatgctggattttggcccgtgatcaggcgaccatcggtgacgacattctccgaccagttcggcgccggctgatgtagcgcgccgcggtcattgagggttgatgccagcagatagggcacaaccttgtcgtatttaacctccgcctcttctgcatcggtgaaggcagcaagcttcttgctggccacgagatagctgccgtctgacagtttcgcgttcaccaaggccgccgggccgtggcaaaccgcggaaacgattccgccggcttcccatatttcgcggatgaccgtttgcacggccgcgtcgtctgcgaaatcccacattgtgccatgacccccggcgaagaacaccgccgaataccgcgctggatcgaggtccgcgagaaccagcgagtgggcaagcgcgtcgcgaaacgccttatccttccagaagcggtcgttgaccggatcggaaaggtcgaagaagtcgatcggcggatgtccgccgcgaatggaggcgatctccaccgggatgcccgcagcctcgaacacttcgagcggatgggtgagctccaccattgcaaaaccggtcggctcgccggtgtcgccgcggatcgggtggctggtgaccacgcaaaggatgggcttgatgttatctgccattgacttctatcctcatgatttgagcgaggccaggtcgatgacgaagcgatatttgacgtcgctcttcaacatgcgctcataggcttcgttgatctgttggatggggataatctcgacgtcggaaacgatgccgtgctgaccacaaaaatccagcatttgctgggtctccggcacgccgccgatgaacgacccggagatcgcacgacgaccttgcacgacggaacccgccctgaccggagtagccaagggccccatataacccacgaggacaagcacaccctcgagcgcaagggtggtcatgtaaggattgacgtcgtgatcgtagggaacggtatcgatgatgatgtcgaaccgccctgtcaccgccttcatctgctcggggtctcccgaaagcacgacatgatcggctccgagactgaaagcgtcttcttccttgccggcggaacgggtgaacaacgtgacgtccgcgccgagcgccttggcaagcttcaacgccatgtggccgagaccgccgagaccgatcaccgcgaccttgctgctcgctcccactttccagcgatgaagcggagaccatgtcgtaatgccggcgcacagaagcggcgcggcgcccgccggatccagcccctccggcagctgtaatacgaacttgtcacgcacggtgatggaacccgagtagccgccaaaggtgatgctgccgtctcgccagtcgatgctgttgtaggtgaacgtcgcgccctcgacacagtcctgctcccagcccttcagacatggtttgcagtgctggcaggagtcgaccatgcagccgacgccgaccatgtccccggacttgaaacgggatacgtcggttccgacctcgcgcacccggccgacaatctcgtgaccaggaacaatcggaaaagtagtataaccgccgtggttcctggccaagtgcaggtcggtatggcagacaccgcaatagagaatatcgatggcgatctcgtccggttccggagcacgccgttcgaagacaaagcgctccagtggggcagtggccgattgggcggcaaagccaagtgcattcatggtggttctccgttcatgcctgttccgcaggcgtgattgcccaggtcacgccaaggcggcgtgacctgggctaagggcgcgagctggaatcagacgttgccgggtgcgaaaagggcttcccagttcgcaaacgggccgagcgggatgacttcccagtcaatgaggccggccttggcaagcggaaagtcggcaagcgatgccttggctgcctcaatggactcagcttccgcgatgatggccacgcctggacgatcctgtcggaaataaatgtcgcggatgacgccatccttgtacatcttccaggagtgccggacttcatccaacatgtgcggctggtatttctcaaggctggcgccgggctgcggaatatcaaggcaaagcagtttcatctcaaggatcctttcgtgcgttagcggattgcgtaggtgtcaatcgccgcgtgatctcggccacgcggcggcccagatagtgcgcggtccgtaggtcgcactctggcggcgccacatccggtgcctggtcaacgttggcgtgggtcatcaccccaagccagctcccaagtcgattgagggcgtccgggctcgatgtgctgctgttgtttcctggcatcaggtcgagaccgacccagatcatgccgtgctgggcggcgaacagcgccatggaaacaagcgagttcagcttgtctccatgctgcgcgccggaattggtgaagccggcgctgatcttgttgcgccatttgagctcagtccaggcggccttggtggactcctcgaagaactgcttgagccgggcgctgatcatcccattgtaagtcggtgagccgaagacgatcgcatcgctcttctcaagaacgtcccagtcaaccggcccatcggcgacggcgatcagctctgcctgaacattgtccacgtccctggcaccctcggcgaccgcctgggcaacacgcgccgtgtgtccatatccactgtcaaatacgatcgaaaccagcaattgtccgtccttttgatgatgaatgcccgcgctccgacgggatcaccgtatctcgggccgttgaaaactcgtttaccgatacggggttctatcgtagaattggggtcagcagtggcgatagtttttccgttatctgcttccccgcattctacatcagaggcagaaatggttggttcaaagtcggttcgcgacagatttgacggtatcgaagtgttcgtcgaagcggtcgaggcaggcggtttcgccaaggcagcggaccggctgtcgctgacacgctcggcggtcggcaagtcgatcgcgcgactggaggaacggctcggcgtccgcctgtttcaacggacgaccaaaatgcagtgcctcaccgaagacggtcagcaatattatgagcggtgtctgcgcgccattgacgaactgcgcgcaggagaagtgatgctggagaccggccgtcaggaagtcgccggtcggctcagggtgtcggcttcagtcctgttcgggcgctattgcgtcgcccccatcttgcgggcctatgctcgtcaacatccccgacttgaactcgaactgagtttcagcgatcgccaggtcgatctgatcgccgatggctttgatttggcgatacggaacggtgcgctgggtcattcgtcagccttacgaggacgccggttgggcagccaacgcaaagtcctgtgcgcgtcgccaagctacatcgcgacaaaaggcgaacctcgttcaatcaaggaccttaccaatcacgacctgctcgcctactggagaggcgatcacgggctggcttggcagttacccgaccaaaccggcacactcacagacgttgcggtaacaacgcggctgcgtttcgacgatctcgaggtgatcgcggacgccgccgtcgaaggcatggggctttgctggctgccttactggcttcttcgcgatcggatacggcagggtgagttggtagagctttgggcagatcgcccaagcgcatcaatggaattctacgctgtctggcctgcagcccagtacctgccgcttcgctccaggctggcgatcgatgtactcgcctccgaacttcccaaaagcgttgaaggctaggaccgcaggaattgaagatctggcagcctcgcgtatgacggcgcgaccgccgcgttcacctggtgggactttcttagggagcgggaaggcataaccccagaggtaggtcagcaccgccgtgcagcaaacgtcgcagcgaagacaacggcatacgacggccgatcatcgataggcataagcggcatatcaagaataggagatgcatctgggagacggcaaacacgacccaattgtacattcccgcaatgtctgataaaaaaatcgccgtcgaaagagtgctgaccggatggtagcccggtcgccgtcttaacggacggcaactcttccctccggggtatccgcgacacctggaccggcttgccggttgcaaaggtgtgtccgctgataaccccacgtcatcgtcggcgcaccttctcaattcgttagaaggaagtacgacgttgaatcttacagaaaacacaatactcatcactggcggcgcaacgggtatcggcttcgcgctcgcgaggctcttttccgagaagggcaatcaagtcatcatctgcggcagaagccaagcagcgctggagaaggcgaagacggaagtgcctgcgatggtgacgcgcatttgcgatgtagccgacacaaatagccggcgcgcgatggtcgaatggctgaaggccgaataccccaccctgaatgtggtcataaacaatgcaggtattcaggcgcggcgtgacttcaccgccgatccggagatcgctacgctcgaccaggaagttgcgatcaatctcacggcccccatccatctgatcgcagagctgctaccgacactgagacagcaggggcaggggttcatcgtcaacgtcagctctggtctggccttctcgccaatggctgatgttccggtctattgcgcgacaaaggccgcgatacattcctttacgctcagcctgcgtcaccagttgaaatcaactggcatccgggtggtggaagtcgcgccaccaattgtcgacaccggtctcggtggcaaggcccgcagtggagggacagccaatcagatgatggtgacccctgaagacttcgccaccgaggcgctcgaacagcttgccgaaggcagggacgaggtcctggtcggtgtttccgccaagacacgcgagctaggcgaagccatgttcgagcgcatgaacagccgcgcctaatgcattgcggattgccgtgattttcgtggcaatcctctcaagctctgcaaaagtatggtgccagaaactgtcacgtagatgtgcatagtggtttggaccagagcgagtttctccatcaagtttgccgggtttgccgcgatctcgacgcgaaggatgctggcgcaggtaggtcacgcggcggcaaggagagtgcgctagtcgcacgatcagaacttagcatcacaagtgtcggagcgcctacctaactccgaaaaaggaaaacatatgaaagccgttaaattcaacgagtatggtggcaccgatgtcctgcgggtcgttgaggtggaggcgccgcacgcgggccccggtcaggtgcgcatcgcggtgcgggccgcgggggttaatccgatcgactggaagctgcgggcaggatatgttcgcgacttcatgccacttacctttcccgccggcgttggttccgaagctgcaggcatcgtcgatgagatcggggatggcgtctcgggcgtcgccatcggtgatgccgttttcggttacgggcagaatacggtggccgaacaggcggtgttgagggcctgggcacgcataccggaaaacatgccgattgagatggccggtggcctagcggtcatcgttgagacggccacgcgcatcctcgatcacgttaaccttaaagccggtgagacgctgttgatagcaggtgccgctggcggggtaggaaccgccgccatccagttggcgcgccactgtggcgctcttgtaatcggtacggcgagcgagccgaagcatgattacatccgcgagttaggtgcgataccgacgacctacgaacctgggctggccgcaagggtacgcgaactggcgccgcagggcgtggacgcggcgctcgacctcgccggtgccggcgtcatcccggagctggtcgagattgtcggtgatcccgcgcgcgtcgtatccatttccgacgtcacggccccgcaacatggcgcgaccttctcgggccgatcggccgatcaccccgaagacgcctttgccgaggcagcgcggttgtatggcgaaggcgcatttcatctacgcatcgagcggactttcccgatcgagcaaatcgccctggcgcaggaggttagcgctgcggggagagtgaccggcaagctcgtcatcacagtgggctgagccgacctccggcccgcgtgatgattgcacctgcgggccggaaggctcagttttactggccgcttactggctaccgatcgcccgatacgacgggaaaaacgacagttgcaatgaaaaatcctcattttccaaggatctagaaccatgtctagcgtcgagccactcgacccgtcattcccgttaacccgccagatggaagtcgaagcggcccccatcgtgttggtcaatctctgcaccatggcgcccgaagacgaagcagcgttcttggtcgcctgggccgctgatgccgccttcatgaagagccagcccggctttatctcgacgcagctccaccgcgcgctaggagacagcccaacctacctcaactatgcggtctttgaatctgcagcgtcgtggcgcgcggccttcaggcaccccgattttcaggagacggcgaaggcgcatccggcgtcggcggtctttcgtcctcatctctttcagaaggtcgctgtgccgaacctgtgcaccgcatagcgggcaacgatttccgagttccgcgctcggagatacatgagcgctggggacaaagcgctcattgcccgcggcaacataataagcctgttgcggctttgatgtcaggcaagcctcgtccttgattagcacgaccgccgacgaattgcggcaaatccaaacgccatttcaagtgggctagccgcatcaacctgcgcttgcctaacatgcggccaagtcgaacgggcgttggtgaactcgggacttatctgtacttccttgcagccgaccatgctgttccggaactttgcgctgtcaagtgccgaagctgtggccgcttgattctgcgtttgctcatcctgaaagaatggtgacagaaactgtccccatgctggtttatgtacgtttgcgattgcggagaggcatcgaaccctctctcgtgcaatgccagaaaggatttgaaagtatgtccagacgtaaaccaatcgacgcttatccagtcgcttgccagaaggcggcgcgacctcgcctctttggcaaagcaaccgttttcgaatttgctcggcttgaggcactctgatgcaaagaattcaatatagcaggtatggcggcccggagttgatgcgggtcgaggatttcgagttgcccgcggtcggaaaaggtgaggttgccgtgcgggtcaagttcgcggcgatcaaccctatcgactggaagctccgcgctggccaaatgaagatcgtcaccggcagaacctttccccgcgccatgggaatggacttctcagggatagtcactgcgatcggctccgacgtcacgcggctcaagattggcgacgcggtgttcggtcttgccaagttcaaggaaagcggtgcattcggccatgccgtggtgacaaaagatacgttcctggctcgaaagccggataatgtttctttcgaggatgccgcatgccttggcacaccaggcgtcacggcctggaacgggcttatcgacaaggcaaagctgcggcctggccagcatgtgtttatcaacggctgcgccggtgctgtcggcgaagcagccgtgcagatcgcgcagctcttcggcgccactgtttcggggagttgcagcgcgcacgacatggaacgtgccagatcgcttggcgtaaagacggtctacgactatcgtaccaccgatctgtccaagattgttgatcgcttcgacgtcgtctacgatacggcggccacgctgacactttctgacggaatgcgtatgctgagcaaaggaggcgtattcctggatttgaaccctgggctcggcaagttcattcgcgcagcctttgatcgccggctaaagcccatcattggttctccccgggccgaagtcctggaaaaagttgccgaagcagcgggcgcaggcaaattcaaaatcccaattggagaaattgtttcactgagcagcgcgatcccactcattagcgagcttgagagaggccgcaagctaggcggcaagggcgtcatggcaatggagtagaaatggcaagaagtcatcgactgttcgacctgatgcaagtccttcgcagacatcgcgcgacggtgtcgggccatacacttgcgagcgaacttggcgtgtctctgcgcaccatacgcagagacgtcgccaccctgcaggacatgggcgcagacatcgatggtgaggcaggtgtcggctatatcttgcagcccggcttccttctcccaccgctgtcgtttacggacgaggaagtccaggcgctcgtgatcggtgcccagtgggttagtcgccagacggacgactcgttggccttcgccgtgaagaacgcgctggccaagatcaatgctgttcttccacctgacatgcgatccggtctcaacgaagatatgatctatgtcgggcatcccctgaaagggggcggcccgctggatctaagcgagatccgcaggtcactgcgagagcagcgcaaactgcgcatcacgctatctctgaaacatgtcaacctgggaaaggagatcatctggcctatcatgctggggttcatagaatcaaagcgttttatcgcggcctggtgtgagctggacgaaaagtttcgtgtaatcggattggaagatatcgaaactgcggaggtcctggtcgagcggtattcacgaaaccgccgccagctcgtaaaggaatggcgtgcacaagagatgaggccctgcaacagcgaaggcgaagtttgttgagcctaatttagcgccgacgtttcactaagctgagcagaggctctgctgcaaggtcgggaacggctatatttttcgtggtttgttcgcaattttgcagtgaacattccagccgttgatgcagacatgggcgaagtcgtaaaagcctattccacttccaaaattcaactaggacgaaggtgcatcatgaaactagttcttccattcctgcgcccgctctatgatgcgctggagccttacgcctaccctctggtacggataacagttgggcttctgctctttccccatggtgcccagaagctcttcggatggttcggcggagaccccgctcgggccattgactcattccactccattggttttgaaccggcggcgttgttcgtaacgataactggcgtcgtggaattttttggcggcttgcttgtcgccgttggtctcctcacgcgacccgcggccgcgatctgcacctgtctacttgcggtgacgatctgggttacgtcggcaagggggtgggcggctatggaatacagcgtcctttggacaattgtttgcctaacaatcggagttcgtggcgggggtaggatatccatcgatcgtttgatcggccgcgaattctaagagtccgttcaagaaagcaggtaacgagcaagccttctggtcatgagcttgatcattgcagtttgcatgaaggcgaggcttgtggccgagaaacgttcgaagtcctttgccattcggcggtttatgccgagccacgccagcgtccgctcgacgatccatcgcttcggcagcacttggaacccggcctgatggcgcttgacgatttccatcgggcgcggactggcctgttcgaccgttgggccctgatagccgccatcgccgcagattttctcgatgaatggaaagcggttggccaacttgtcgaaaacaagtgccgctccgtcgcggtcctgaattcctgctgagtggacttcggctttcaggagcatgcccaaggtatcgaccagaatgtgccgcttgcggccttttatctttttgcctgcgtcataaccgatatcgaaacgggcgtccgggccagtctccaccgactggctgtcgatgatcgcaaatgatggttgctcttcgcgtccctcaagctgccgcgttcggcaatagagtgcatcatggatacgtcgccaggttccgtcccggcagaaccgtttgaaataatgatagaccgtgctcttcggcggaaaatcatgaggtagcaatgcccactggcagcccgactgcaacagatagaaaatcgcgtccattaccgagcggagacaggtcttgcgcctgcggccaagacgaggctgccttggcatgaacggctccaccatactccattcgcggtcggtcaggtcgcttgcatagcgcatgcggcttctgtcatggtgacgccgggtgaagggtgtccaggccattcgatctctccgtatttgtcgcaaaatacaaagaatctgattgccgcccttcactcaaccccgcgctcgccagccattgttgaacagacactaaggcaatcgccggtatgagtacgcctagacaccggcaggcgattcaaaaattgacgcggcctatcttgatctatcggttcaacggcatttcaccgaacactagtgaacgtggcgacgatatcgaacgccgtttcgccaaagattgtctggatgtcaagaaacttggaaggcaggcgggcttggaagcgcgatggcacggcgtacgaagggccagtgcatcggcacgccgggtggccctgaacattgacgataagtctggctctgctgttccataatagaacttatgcgatacgttataacgtaacaaagtaagcttgatccgttcatggagtcatggatgctgtcaccgatggaaaggacctcccttcgctgggtgtctcgaggcaagaccctcgacgaaatcgcttttgcccgaaggaaagggcgttgccgatatcgagcattatctagcgcgtgcaattgtcgcgctgaaagcaagatccattgaggacgcgcttgtgaaggccgacatctctgcgtccgagtgatgcgaagattacaatggttcttcgtgaaagagcacttttgcggtgccttcggcattttccttgagatccacgccggtcagttgcaggcgcagtgcctcccggacgatccagacgattttgtccgcggccatctcgtaactcagcccgtcggcgtggatgttggagatacagttgcgctcactgtcacgccgtcccgcttgcggatggaatgtgatataggcaccaagactgtccggcacgctgagccctggccgctcgccgatcagaacgatcgccacctccgcaccgaacgccgccgcagcctcatcgccgaatgccaccctcgcctgttcccccaatatcaccggggcgaccctgaatcccccaaggcgcttcatgcatgccttgaagagcgggaccgcatggcgctcaaccgccgaagcggacagcccgtccgcaatgacgaacgcaatgtcgtggctattccccggacccggaagatcagccgcaagcggctgacgcccgagatccggacgcgacagatagacggtgcggtccgtggcgcaggacctgacccggatcgttgatgctggcgcaagctccttggcgagggcgacaaaatccactcgaccgtgcacggcgtccctagccctggcatgggcaagctgaaaatccaagattaccgtcgtcggcaacgcgtcgcctgccctgccaagtccaatccgggcacgtgtcgaattgcggaaccgctcaaaggggtcttgatcccaactcatgcggacaccccgtagctcaaaagattgcgagagaattggcccgaggcgctggcgggcgccagacggcccaaatggtcaagcatgcccatgcgctgaagccaagcctcgaattccggcgccggcggacgattgaactgatgcctaagaccgacaatatcgtgataggagaggctctggtagttgagcatgacgtcatctgcgccgggcacggcaatgagaaaattgacgcctgcgacggtgagcagcaccatcagattgtccatgtcgtcctgatctgcctccgcgtggttggtgtagcagacatcgacgcccatcggcacgccaagcagcttgccgcagaaatgatcctcgaggccggcgcgaatgatctgtttagcgtcgaacagatattccggtccgatgaaaccgacgacggtgttgacgagcagcgggcggagttcccgcgccacggcgtaagcccgtacctcgaccgtctgctcatcgacgccatgatgtgcgtctgccgaaagggcgcttccctgaccggtctccagatacatcacattggttccgacggtgccgcgcttcatcgacagcgcggcctcattgccttctctgagaacggcaagatcgacgccgaatcctttgttcgcagcctcggtgccggcaatcgactggaaaactaggtcgagcggcgcaccagcctcgatcgccttgatagatgtggtgacgtgggtcaacacgcaggactgggtggggatctcgaaccgttcgcgcagccggtcgaacaggacgatcaatctggtgcaggcatcgagattgtcggtggccggattgatgccgatcacggcatccccgatcccgtagagcagcccgtcgagcgtcgaaccggccacaccttccggatcgtcggtcggatgattgggctgaaggcggctcgaaagcctgcccggcagcccgatggtggagcggaaagctgtagtgacactgcatttgccggcaacagtaatcaggtcgtgattacgcatgatcttggaaaccgccgcgaccatttccggcgtgaggcctggtgcaagtgccgccagcctttcggtcgtcgcgtcgtaggaaagaagccaattgcgaaactcgccgaccgtcatatgcgaaaccggcgcgaatgctgccgggtcgtggcgatcgatgatcagccggctgacctcgtcggtctcataggggatcaacagatcctccaagaaggttttgagcgacatgtcggcgagcagacagcgggcagccacccgccgctcattgcttgaagccgcaataccggcaagcacatcgcccgacttgagtggcgaggcacaggccatgaccgatttcagatcctcaaaaacatggcgctcacgcccaagaatgatcgaatacatttttctccgctcgtgggtatcaggcagtccatttttgcgcgagggcgcagctaccttcggaaatgtaagtgctgaccgagtttggccagtacggttgccatggctcccgaaagctatgcacgaaccatgccactcttctgcaggcggtacgcgatacctttcatcgaagatttgcggatcccaacggagcaatacggatccgccaagcatcatgacggcggtcggaactcgtatcgctcgacgcggcttcagccgaccgttagcccggtcttcactgtcgacgaagctctttcgatcagcgtggagagataggcagcgacagaagcttggtgatccgcggtcgccaagaggtcgtttcgaacctctatcatgacattcggaataccgttcgcgatgccgtgctcgatgagcgtgtgtgtgaccccatcagctggaccgtacggctggttgcgcatgacgacaaatttgtgatcgttttcttcagtcccggagaggattgcgtccgcgagcctggtgtcgctgtcgtgcaatattccgatctcgacctcgcgctttctgccgaaatagacgggggtaaaactgtggacggtaacgagcatcgtctcgcggccctgggctttgcgagaggcgagaatttcggagattccatcacgaaagggcaggtaaatttcattgacccgcgccacacgctcggcctgcgagatgtcctgatttcccggaacgtcataaatctcgcttgtccctacaatcgcggacgctgcctccggcgggcgattgcagtcgtaaacgagccgcgaatagcgctggtaacagagaagcgcatcgagggatgacgaaagatatcgcgagactcccagcgctcctggatcccaggcaatgtgactttcaagcgccgaagtatcaagaccaaggcagcccagcgctgccgggatcagacgcgaggcatgctcgcaaacgatgacaatgtcgccgcgtgctgcgtcgttttcgatcgcgagcgatgacgccccagggcgcaaaagcgagaattcgggcatctcaaatctccgttgatatccacacaatatcaacgaaagcaataaaagcaacacaaacccacatttggtcgatgccgctcagattgccggccgaaactgcttcgacctggcctttcgcgctttccataaaaaatggtggaattgccaaaatcgtaggcaaaatgccccaaaccagcgcctttttatgaggcagtggatatttctcgttattaggtcccttctatatcctagcgcttttgtgggtggcagcgttcgatcgcgcgacgaagttttggtgccgaaattttgaaaatctcacaacaccgtgttgacaaatgcaacatatccacataaatccacatcccaaggagatcgagatcgtggatttttcagttcttacattaagcgcagcaattgcttccggtgagctctcctctgaggctctcgtcacggaatgcctggcgcgcatcgcacggctaaatccgactatcaacgccttcagccaggtttatgaagaaagcgcgctagaagaagcccgggcctgcgaccgtgaggctgcgcaaggccacttccgcgggccgcttcatggcattcccatgggcgtcaaggatctcttcttcgtggatggcctgctgtgccagcgtggctccaacgcttacaagaatttcgctcccaaggcgacggcgccgatcgtccagcggatgattgacgccggatctatcattatcggcaagacgaccaccaccgaaatggggtggtccggttcgggcttttccgaattctatggtccgacacgcaatccctggaatcctgacctcactagtggtggttcgagctctggttccggtgcggcgcttgcggcacggatggttcccttcaccctggggtccgacggcggcggctctgtgcgcatccctgctgcattctgcggtgtgttcgccatgaaggggtcgctggggcgggttccggcgtggccatggagcgcgactgagatgttgtcgcatgccggcccaatgagcctttcggcaaaggatagtgctttcttgttcaacattgccaaaggccccgatccgcgggaccatcaggccctgccggacgacgaagccgactacacgcagacgcgatcgatgaagcctctgcggattggctttgctccaagtctctttggattcagggttgcgccggagatcgatcgggtcgtccgtgaagcggtcgatacccttacgcaggcgctcgccatcgatgttcgtccggtttcccccgactgggaagacccgatccgaatattcgagaccctttgggttgccgggcgaggtgtcgcctatggctcccagtccgatctatccgatttcggcagtggttttcgtgctctcgtcgaggcgtcggccagctataatctcaacgactacctttcggctgccaaagcacgcgccgaatttgcgggtcacgtgcacgcattcttcgaagatatcgacttgttgctcctgccaaccgtcccggtggagccctttgcggccgaccgcgaggcgcccgaaggcttccaatcaccttcggaagtcctcgcttggaccggttggacaccgtttacatatcccttcaatctgtcgggcaatccggcggcttcacttccttgtggcctgactgtcaatgggctgccggttggcctgcaagtcgtcggccgccgtcatgctgatgcgcttgtcatggcattttgccagcaagccgaaacctacctttccaataataaaaatcctccgcttgttgttgctggcgacacggcggggtggggaacacccagcaaacaacctgtggagaagtcgttatggagttcaatagaagagcattcttgagaaattctgcgcttgccggtgctgcactcggcatgcctgtcctcaatccgtcatttttggtaaattcggccttcgccgccgaaggaaaggtactgaacttcctttcggcggaaaatcttacgggaaactgggacccctcctcccacacgacgctcgctcagatcaaccttgagagcttcgtgttcgggtatttgacacgggcgcccatggggccggacaagcccgatgagcttgtcatggaactggcgaccgacatgaagctcatcgatgagcacacgttggaattcaagttgcgcgaaggcgtaacattccatgatggcaagcccttcaaggctgaagacgtcaaggcgaccttcgaatatgcaagccagaccgaccgcccggccgcgtggtatcccggcccgtgcgaggttgagatcgtcagcgactatgtcgcgcgcgtaaaaaccgataaggccggctatcctgccagcctgttctggttcctctcggcattcctgccgattatgtcggcaaaggatgttgccgatccgaagacgctttccgcgcggccgaatggaactggttccttcaagttcgctcgccaggacggcaacacgacggttctggaagcgttcgatgccttctatctcggcaagccgaaaatccccggcatcaatttcagcttcgttggcgatgcgacgacgcggaccctcgcgctcctgaacggtgaggccgatctcatcgaacgtctcgaagcagagcaggtggacaccatcgaaaaaaccggcggattcagcatccacaaggctgtctcggtcgagaacaagtatctctggttccgttgctcgaagccgcctttcaacgatgtccgcttgcggcaagctgccgctcatgcaatcgatcgctcggtgatcgtcgatatcatgggtgtctcgggccacgcatcgaatgcctggatttctccggtgaagttcggttacgtcgacacgccgaactatccgaaattcgatccggatgaatgccagcgactgctcgccgaagccggcttcccaaaaggtcagggcctgccggagcttgaatatatcacttcggtcggtttctatccgaagacgaaggaatatggcgaagtcatcgccgcaatgctccaggaacagggcttccccgtgaagcttaatgtcatggaagttgccgcatggaacgaccgcctttacgatcgaccgggtggcggccccggccacatgatcgactgcggctggtcgacgggctcgccggaaccggatctcgtgctgcgcacgcatttccattcgagttcgaagcgaatttgcggtatcgaggacaaggatctcgacgcggtcctcgacaaggagcgcaacacgctcgacccagcggcacggaaggcggtgatccagaatgaggtcatgcccacgctcgccgaaaaggtgccgtcgctgtcgctattcacgtcggtcttcattcatgcaatgcgtgatggattgaaggatatgtacttctatccgaacgggatgatggacgcgagcaaagcgattttgtcctgatagaatagccgcggccgctacacggtggcggccgctccccctagcgatcggggaaaggtagatacatgtttatcctgtcgttcttgttgagacggctcctgcaggggagcctgatcatccttctcgttaccttcatcatcttcaccctgttgcgggtggttcccggtgatccggcccggcttattgtcggcggtatggcgccagacgcggtggtcgcgcaaaaggcaaaggaactcggtctcgaccgtcccataccattgcagttcgtatcctatctcggcgtgcttgccaccggagacctcggcacatcgttcgtcaggccgaagagcggtcaaagccttgggggatcggcctttgacgacgcgacccgcgaggatcgagcaaaggtgcttgacctcgttctcggtaccctgccgatgacccttcagctcggatcgctagcattggcaattgcgttgctggtggccgttccgcttggcaccgccggggggctctatccgggccgttggccggacaagttggccctggcggtcggctcgatctgcgtgtcgactccaaacttctggctcggcatcgtccttacgcttttcctctccgtgaagctgcgtctgcttccggccatcggctatcacgggttcagctacacgatcctgccggcgatcgtgctggcggtggaaatcgtccccttcatcctgcgcacgctcacggtttcggtggctcaggtgatgcgtgaggacttcatccagctggcgccgatccgagggctcacccgcagtcgcacgatcttttcgcacgcgctaggcaattcggtgatcccgctcatcaacctgctcggagtgcaactcggcatgctgctcggcggcgtgctcgttatcgaattcatctttgactacccaggtctcggccttctcacgatcaatgccgtcctgcaacgcgacttcccgctgatccagggcatcgcgatcttcatttccgtgatgttcgtgatgatcaacgtccttgtcgacctgatcgcgatgaccatcgatccgagactggagtattgacgtgaccgatatcgttcagcaaagcgccgcaccgcgcgccgtaaccaagcgtggcgtcacccccacccgacggatattgcagatcgccgccgcacgcgcggatttccgcatcggtctcattggctttggtcttctcatcgggcttgcgattttcctgcccttggtgagttcgatcgatccgatcaagattgcctatacgtccaaactgctgccgcccttcccggcagacggatggcaatggccccatttgcttggtacggatcaactgggccgcgacgtattgatgcgctgtctcgtgggcctgcgctactcactgttcatcggtgtcaccacggtgatcctgatgttcgtcgtcggatgcagcctcggactttatgccggcttccgcggcggctgggtggattccgtcatcatgcgcctgacggacgcgcagctctcgatcccgatgatcattcttgccatcaccattctcggggtgtcccgcccgacggttcctgcgatcattctcgtgctcggcctctccggctggccgctctatgcccgcgttgcccggtcggtagcactcggcgagcgcaatcgcggctacgttctcggcgaacgggtgctcggcgcgtcggaccttcgcatcatgctgctcttcgtggcgccggtcgtactgcccccgatggcttttgtcgcggtgctggatatagcccgcatgatgatctttgaatccatccttggctttctcggccttggcgttcagccgccgacgccaaccttcggcaacgtgatcgccgacgcgcggaagtatctgatcaattcgtggtggatcgcaacgatgcccggcctgtttatgcttgtctcgctcacttgcctcaacctagtaggatcggcacttgagcgagctcgcaacgcagttctgagaggagaggcatgatgaccagtcctattctcaccgtctctgatctaagcgtggacctcatccgtgagggcagcaaaaggcgtatcgtggacaacgtcaatttctcgctgcagcctggcgaggtactcggcctcgttggagaggcgggttccggaaaatcagtccttgcccgcgccctggtgcatgcaatcggttcgcctctggaaattgcctcaggcaaggtaatcttcgaagggagagacgttctctcgcttgatgcccgcggtctcagatccgttcggggcaaccgtatcggttttatcggtgccaaccccatgggttcgctcgaccctcgtctgccgatcggccaccaaatcatcgagaaactacgctgtgttcggcccggcatcggacgggctgaggcgcgggagaaggttctagacctgctcggccgcgtgcgtatcccctcgccaaagtcccggtttcatgaggcgccatttcagttttccggcggcatgatgcagcgcgtgatgatcgtcgatgcgctggtctcggatccgtctctggtcatcgccgacaatatcacccagccgctcgatgtcacggtcgccgcgcaaatcatccggctcatcgacgatctcagacagagtatgaacacggcgtttctgttcatctcttcgtcgcttccggtcgtggcacagattgccgagcagacgctcgtcatgcaacggggctgcatcgtagaacgtggcagaaccgaggaaattgcctcgaacccacagcagtcctacacgcgtgcgctgctttctcgtattccgtcgatttggaatgatgtaacgggtccggcggacaaagaaggcgaagccgtgctcacggtcgataatgcaacgcgcacctacagtgtacgacagcgcggctccttcaacagcttcaaccaggtgaaggcggtgcgcgacgtctcattcaccgtgaaggccggggagaactttggcatcgtcggcgaaagcggctgcggcaagtcgacgctgacgcgccttctcgcctggctcgaacagccgaacgttggacgcatcgcttttcttggaaaagaccttgcaggcctctccgcccgttcattgacggaaatgcgaaaatcgttccagttgctcttgcaggatccttatggttctctgccggcggggatgcctgtccagcgcatgattgaagaaccactcctgatacacggtgccaaccggcgtgacgcagcgcgccgcgcacaggaggccatggccgaagtgggtctcgatgccgagctggctcaacgcttgccgatcgggcttagcgccggtcaacgtcagcgcatcaacatcgcccgggcgctggtgctggaaccgcgactgctgatcctcgacgaaaccctgtcggccttggatcaggtcgagcaggcagagcttctggacctcttcaccaggctccaggcgaagcacggattttcctatgtgttcatctcgcacgatctcgcgctcgttcggcgcatgtgccaccgtatcgctgtgatgtatctcgggcgcattgtggaactcgcggataacgagaccctcttcgagcatccgcaccacccgtatacacgggcactcctcagtgcgatgccgacattggaagataatcgctttccccgttctgagtatctcctggacggtgaaccgccgagccctatcgatcttccggtcggctgctcattccgttcgcgctgcccgcgcgcgcaagacgactgcgaaaagatcgatccgccgctgcgagcgttggggggagccaaccacgccgcatgtctccaccgacatgacgaggagaggagtgtgtatgtccagtgaggtccgcaaggaagttatcctcgagcgtcttggtcgtgatcagcgtgtgagcgttctcgatctatcgacggagttcggcgtttccggcgaaacgatccggcgcgacctgaaggatctcgaagcggagggtgccgtacggcgggtgcacggcggtgccattcccgcagggcgcaccgccgataccccaatcactgagcgcatcaaattcaactcgttcgcgaaggatgaggtggcgggtcttgcgcgtacgctcatcaatgacgattgcgtcatcttcctcgacacgggtacgacgacgctcgcactcgcgcgaaagctgagcggcttcaagaaactgagactctacaccaattcgctgatgatcgcgcaagcggcctgccagcaattcggcgtgaaggtgcaggtgacgccagggaacctgcgcccgatcgaacaggacctcgtcggttacgacacactttcctacatccaacagttccactttgacatggtcttcatgggcgtggcggcggtcaacgcagattacggcttcatggatttcgaggaagacgaggcccgaatccgccaggcgctcctgaggcagtcgtcacgcagcgtcatgctagcggatcactccaaattcgggagggtcggcaatgtcatcaccgctcctttcaagcagataggcacgctcgtgactgaccgtcgtccgccggaggatattgtcgccgcggttcggacggaagagctggagatcgtccatggataatgcagggacgataccgcgaactgatttcgacgcgatcttcgaccgcatttctgccatcggggctcagcacggcgaaggcgtgacccgtctggcagcaagcgccgaggacggcatggcgcgaggcgttttcgccgtgtggatggagcaagcgggcgtgcacgtcgcgcatgatgcaatcggcaaccagtttgcctgcttcgattgggtcggtcaggatgccccctggatttttgcgggttcgcatctcgacacccagccgcgtggcggccgtttcgacgggaccctcggtgtgttgaccgctggacaggccgcgctggatattcatgcagaggttcaacgcggacgtttcaaaccgcgctataacctcgcggtcgtcaactggacaaatgaggaaggcgctcggtatcaaccgagcctcaccggcagcgccgtctattccggctcactgacgctcgatgatgcacttgacctgcgcgacggtgacggcatgtccctaaaggccgcgctcgcggcgatcggcatcaacggggagaccgggacggttcccccctcgcccgcggcctatgtcgagctgcatgtcgagcaaggacggaaacttctcgaagcgggccggcgcatcggtgtcgttgaaggaacctgggcagcacgcaaaacgaccgtccgctggatcggccgggcggcgcataccggcccgaccccgatggccgatcgccgggacgcgcttctcgcagcagcacagggcattgccgccttcgaggccgtcgtcgcggccaactttccccacctccatcggtcggccgcgcgcctcgtcgtcgaacccaactcaccgaatgtcgtcgtcgaccgggcgaccgtctggttcgagctcagaggtcccgacgtcggggaactggacgcagccggtgcgctcgccctagcggccgtcgaaaaggcggcagccgatacgggcacgcagctggaaatcgtcgccgatacactgagggaccccgccagcatggatggccggctgatggcacttgtcggccgggcggcacgctcttgcggtttcgagccgctgaccatgcgttcggtcgcgggccacgatgcggtcgcgttgcaaaatagcggcattccgtctgccctgatcttcattccgagcgtcgatggcattgcccatcatcctgacgagctgaccgagccggacgatgtgcaggctggtctgacggtgctcaccgccacgcttcgccacctcgtccagggagagttctatgcaggatgatgttgcggttcaggcagcgctcgaagcggtcggtctttccggtgcgacactctcagcaccgatcggcggcgtcgtctcgcccattcaccgcgctgtcgaaaacctctgctttttcgcgaccaaggcgggccgacctccggtctttgtcaaatgtcgtcacgatgacatgtcccagttcatcgcgccggaccgggtggccgacgccagccgcaaggcaggcgagcttggcatttccccgcgtttgttacatgccgatcgcagcgatggcatcctggtgttcgaggtgcttggcgaggaatgggcctgggggcacaccgatgtccttcgccgcccgactgttctcgaaaaccttctgacggcaaaacgcacctttcataaggctccggcgcttgccgaaacgcgcagcgttttcgatctcgttgcagcctaccggcaccttgccgaaggatccgaagtgagtttgccagcaccggtggtcacggtctcggctgccgtccagcgcattgccggcgccattggcgcctcgggtgtcgatacggttccgtgccatgcagacggcgtctcgtcgaacgtcatggtcgggcccaacgacggagttcggctagtcgatttcgagtggtcgcgccaggcggaccccgcgtatgatctcggaatcgtgctggccgaactcctcccctttgatggcgatgcgctgctggcgatcgagatcgcaaacggaaagcctgatgcgggcgtgcttgcgcgggcccgtctctacggcgcggccgacgacctcatgtgggcgctttggggcttcatcaacgccgcccactcgccgcgcaagcatgttgaattcttcaaatatgccgaatggcggctcctgagggcccgcacggtcatcgaaggcccccgcttcgagacatggcttaaacaggtctgaggaggtagcgatgagacgcagactaggcgaagggacatcgcaggcagaacgggcaatcgagcacgccatcaccgctgtggcggagtggcagggccttgaaatttcttacgaacccgtgcctggcggcatcagcaatcccaactggcgggtctacgtcgtcggtgcgccgcacagctttttcgtgaagatcccaggtgccggaaccgaaatgttcatcgaccgaaggaccgcgaacgaggccgggcgcaaggcgcattccgcaggcgtcggcgcgcgcattatcgacttcttccctgacaccggggtcgaggtcagcgaattcgtcgaggggcttagaacctcgaccaacgccgactttctcgatccggtcgtgcgtttcaatgggcttcgcgccttgaaagccttcaacgacagttcgctgctttcacagcgaaagaccaccttcgacatgatcgacgaacatttccagcaggtcctggaactgggtggtcaatttcccagcgacttcggttggttgaatgctcgctatcgcgaggctcgcagtgcgctcgaggcgtcaggtctcgatcttgcgccctgcatgaacgatacgctggcaggcaacttccttctccacgcggaccgccgcgtgatgcttgtcgatttcgaatatgcgtcgacaaatgatcgggcggccgaactcgcgctttggttctgtgaaatgtgcttctcgcccgaggtcgagaaggagctgatcgaggaatactacggtcgggcggatccgggcattttggcgcggatctcgctgttcaaggcgcttgtcgacctcaagtggtcgacctgggcaatggttcagaatgaagtatcaagcctcgatttcgactttttcaaatatggattctggaaacatatgcgcgcgcgtttcgtgatgagcaatcctcaatggccgcaatggctcaaggcggtctgacacatgcagaacactgaaggcgtgatctcccccgattttcttcgccgcctggcggcggttgccgcgcgcgaagcattgccgcggtttcgattgccgggcgccgtcgtcaacaagatcgagggcgggttcgatccggtgaccgaagccgaccgggaaacggagaaggcacttcgagagctcattcgtagcgaatatcccgaccacggcatcctgggtgaagagttcggcaatgaaggcgcggatgctggcctggtctgggtcatcgacccgatcgatggaacacggtcgttcatctccggcattcctctctggggcaccctcgttggccttacaaaagatggtgacgcagtagccggtatgatggcacagccgtttatcggtgaattgttctatgcgaccggcaacggcgccttttatgaggggccgcacgggcaggcgcagctctcgaccagtgccaccaaggatctctccgaggcgacgctgttcacgacgacgcccgccatcttcgaggccgcccgcagagcacggtacgaccagcttgagaaaatggtccgcttggcgcgctatggaacggattgctatgcctattgcatgcttgcggcaggccagatcgactgcgtcgtggaagctggcctctatccctacgacattgttgccctgatccccattatcgaacaggccggtggtgttgtaaccgactgggaaggtgggcctgccgagaagggcggcggcatcgtcgctgctgcgaatgccgcccttcacactcaaatcatgggcgttctacacgcgaagtgacaggtcgttttattgctgctgggagaagtcgtggcgtgacactgacaatcagaggcaacatcccgtcactgaggtctgctaaacgccactctccaccataaacctggacataaatggcagacttgcggcgccgactgcctttggagcgctcagaatactagtaggcatgaccgcgacctcgggaaccaatttctgtagtgagacgcatacgttcctagagacactggccggcacaaaggaagatacgatgaccgcttccaactcgacgaactgggtcagcgacttcacgatgtcgtgcattttttccgcgagtctgccttcccagtcgaaaaccaagccgttctcgggccatggcgcaagcggttgccaaagatgatcggtcggcgcacccgcagcggtcaacatggactcgagcgatgccacgccgacgtcaaaactgaccaccgaattgccgtgatgaatctggtgctttaacaccagccggctgtggaggtttgcgccaatgtaaaaatagagatagtcggaaaacggcttggcaatgccaaacatgctctcgccgccagccgcagcggtaatgtcgttctgcacgaagaccgaatatccagtaagttcctcgacttccttctgcaaagaatcgaaatagtctttttcctcgcgccccgcggaagcactggacggcagcgctaggccaataccggccagacgcttttgtgcatttttcggaacgatgttcaccgcctgacgaatagtatcaatgaacatcgtctggttgctgtcgcgctcaggctgcgggttgggcagctgcatatgatatcgaatggcaccaacgaaatcgatcagaacaacgtctgtccgcttgatgccaacgctgataccaaccgagaaagctccctccggattgagggctacgggaacggtgggaggccccacacgccccttttgcgcctctcctttttgaaccaacccttcttgttccagcgatcttacgagcaccgaaatcgtctgggcggagagacctgtccgttcgccaacctccagtctcgttatctcgctgttctgaaggagtagcgacaacagcaggcgctcgttgtagctgcgcacgctgaccgcattcaggccggttgcccgatcggcgatacgtaagggattcggtggtgcaaaacgcatatcaggcatcaatgcaatcctcgcggagtaaggcatgaagatgaactggcatccaattgtagtctcgcagcggcaatatcatcatctccaaccaatcgcctcgacttcccttgcaagtgctgttcccaacgctgcatgcgcgtccctattgatgtggaaaccatcgcaaggatcacacgccgcgacggtggcggcgtcaaagaaatggacttcaagtgaatcggcaatgatttcgaattcaagggcgagacgccgggatttctcctgagcgccggaaaaaataggttcccattccttgatatcgtccagcattggcggtggcgcaaccaccatgatttcgggggggtggccacccgggccgggagccagttccctgatgtcgtaaaccaggcagccgatccccatcgcgacttccgatggcggttgattgaaacgaaccttcaggtcgttcgtccccagcatgatgatcacaaggtcgaggatcgcgtggctcatgaggcacggacgcagataagttcggccgttcttcagcgttccctcgatggggtcgtcgcgaaccgtcgtgcggccacttaggccctcctcgatgacataccactgagttccgagttcccgtctcaaaacaccgggccagcgctcgtctggcccgtatcgttccagcggcgagccgcccggaatctggccatgggtattcgagtcgccgtaacataagactgaccgcatttcctccccacctttatggcaaatcataaagacgcatgaacattctcgggtgactatggcctttgtcgatctatggcgcaagtttattgatattcattcagtctgaataattattgacagcgatttagaggtgtggcatttctatgaatgggagagcaagattttccagtaattgaataccgccaccctcagtcatccaatggggagctggtacgatagtgatccgcttcggcgggtgctggataaatgcgtctccgtggcaatggagatccgacgtcgatcgatgacgacggcatttggagcaagggaggaattatcagtgaacggctatctgaaatctattctcggggctacgcttgtggtggcatccaccgcgggcccgctttgggcagacgacgtcaagttcatggacggcatcacgccgcgagctggcgacaatccgcagaccgaagcaggcaagttcaaaaaagattgcggctgggtcatcggcatgagcgattttggcgtcaacgccaatacctggacggtccaggtcgcgcatgaatccgaggcggcagcagcagccaacaaatgcatcaagaaattcatcctcctcgatgccgggttcgaccagaagaagcaggtcgccgatatcgaagacctgatcgcgcagaaagtcgacgcgatcatcgttcagccggtcacctccacctccgcaaactcatccatgaagaaggcgattgctgcaggcattccggtcatcgttcatactggccgcgtcgatacggatgactacacgacagaaatccagggcggcgccgagcacttcggcaaggtgatgggcgactggctcgtcaagtctgtcggaaacgacggcaagatctgggtgctgcgcggtctcgccggtcaccccgaagacaccaaccggtataatggccttctggagtcgctcaagggcacgaacgtgaagatcgtcgccgaagagcacggcgattggcagtatgacaagggcaagagcgtctgcgagaccctttacctgaacaaccctgatgtaaacggcatctggtcatctggtgccgacatgacgcgcgcctgcgttgacgtcttcaagcagttcggcgcgaagatcccgccgatttcgggcgaaggaaacaacggcttcttcggccagtggatcaacgacaagttcgagtcgatctcggcggaatactcgccggcgcagggtgccgagggcgtgcatgccgctattgctctgctcgagggcaagcagctctacaagcactacgactacaatcctccgggctgggatctcgagaaggttaagaagtattatcgcgacgatctctccgcgaacgtctggtggccttctcagctctccgaagacgacctgaagaagtattatagcaagtaatcatcctcccgtggcgcttgcgccggtttcgttccggaaccggcgcaagccaccggaacggaattgcgtggattgggaggaacgaatggccaatcttgtagaaatgtcaaacatttcaaagtcgtttggcggaagtctggcacttgatagggtgtcgctggagctcttgccgggttccgtgcatgccctgatgggcgagaatggcgccggcaaatcgacactcatgaagatccttgcgggggttcaccggccagacagtggcgatatcttcaagaacggccacaagatctccttcatcaatccgaaagaggcgcttgatttcggcatatcgaccgtcttccaggaaatgacgctcctgtcgaacctcacgatcgccgagaacatgtttctcggtcgtgagccggtaacgcgcttcggcactgtcgattacaagcgcatgaatgccgaaaccagcaaggcattgaacgagctttcgctcgaccttaatccacggacgttggtttctaatctcagcatcgctgaacggcaatttgtcgaaatcgcccatggcatcaaggccgatgcctcgattttcattctcgatgagccgacggccgctctcaacgccgccgatgtcgagatcatgaacaagcatatccgccgattgcgcgatgcgggcaaggcgatcgtctatatctcgcaccggatggatgaaatcttccaaatctgcgacacggtcacggttctgaaagacggcaagctggtgggtacgcgcccgctttccgaaatgacgccgacatcgctcatcgcaatgatggtcggtcgggaattgaaagatcttttcccggcaagacacgcggcggcagccggcgagccgatgctcgacataaagcacttcaagatcggcgcgtcgacgaagccattctcgcttcatgtttccaagggtgagatcgtcgctctggcagggctggaaggacaagggcagcagaaactcatgcgctcgctcgtcggccagttccagccgttttccggcaccgtcacattccagggaaaatctcttgccttgcccgtgccgaatgagaacggcatccgcaagttacagcagatgggcgtaggcttcgttcctgaagatcgcaaggaagagggtctgttcctgaaccttccgatcgcccacaatatcgagattgccttgcatgcggcacggatgggtttttcccccgcgaagaattatcggaaagtcgtttccgacacgatcaagcggctgaacgtgcggacgatcaacgcgtctgcgcccgtgggcgccctctctggcggcaatcagcagaaagttctgctcggccgctatatcgccgccaatctcgacatcctcctcattgaagagccgacgcgcggcgtcgatatcggcgccaagtcggaaatctacaagctgcttcgcgacttcacgcagaacggcggggctgttctggtcctgtcgagggaaaccgtggagctcatcggtctctgcgatcgcatctatgtcgtccatggcgacacggttgttgccgagatgcccgccgccaaggccaccgagcacgatatcctcgacgccgccttgagcgcgtgaacgccaaatcagagagtcaatgcgatgaataagacccttacaagattgtttacgggaggccagagccgccaaggtctctggatcgttcctctgctgatcacgatcatcctcagtatcgccctgatcgttcagacggaccagttcctcaacagtgaaaatctgttcaacctggtcgcacaggcaatgccgctcatcatcacggcggtgggtcagctgtttgtcatcctcgtcggcggtctcgacctatccgtgggatcgctgatcagtttcacgacagccatcctcgcgttggacgccccgggctacatcttgataccagcggtcttcctgctggcggcgctgctcggcctgacgaacggctatgtgatcacccgtctcaacgtgcatccgatcatcgcgacgctggcaatgcagtatattgtgctcggagctgcgcgcattttgcgtcccgtctccggcgggactattccggatgtcgttatcagctcggtctccggctccttcctggggattccgatgccgatattctggggcatctgtgttgccttggtcgcctggaaattgctttacggatcacggttcggacttcatctcttcgcgatcggtggcggtatttccagcggcgtagaagacgcgacccgcaacttcggtgttgccgacaagcgcaatgtcattctggcctatgtagcctgctcttgctttgcagctcttgccggcgtgttcctggcgggccgcatcgtttccggcgatccgaatgtcggtcttctcttcgagctcgacgcgatcacggccgtggcgattggcggcacgcaattgtccggcggcgtcggcagcctccagggaacgattatcggagccctggtgttggcgctcctctccaacggcatgaatctggtcaacgtttcgccgttcatccaaacggcgatcaagggcggcatcctgctccttgttgtcggtttccagacacgcaagaagatggggctctaagatgtcagccatcgcgaacaatcctgcaattcagcgaatgctcaaggttgcgccttcgtattacgtctttgcattgctcctgatcgtcttgtcggtatcgcgcccgcagatgctcaatgcaaacgtcatgggcatcttcattcgccaggtggcgcccctcggcgtcctcgtccttgggcagttgcttgtcatgcgcgtcaaaagcatcgacctggcgggcggcggtatcatcctgctcgtcaactacatcatttcgtccaatcttcttcccggaatgtcggcgacaggtttcgtactgctggcgctgtttacgggcacggcaatcggcctgttcaacggtttcatggtgggcaagcggcgtgtttctgcggtcatcgtgacccttgccgtgagcatcattcttgtcggagccgtccaattcctgtcgagcggcaagccgccgggcaacgtgccgacctacttcaacaccatctacaatgtgaagtttggcccgctaccgctcccggtcctgttctgggtcttgctgaccgcactgttgtccctgcttctgtcgagaacggtgttcggccggtatgtgacctccgtgggtgcaaatgcggatgccgcgcacttctcgggggtccccgtcgagcgcactgttgtggtcgcgcatgcgctcgcaggcctgatcgccggcattgcagcactggttcaaacggcttcgatcgcagtcggaagcgttcgcgtaggtctggatctgcccatcctttccgttgcagcgaccattctcggcggcgtggtcttcggccgaggagaaggtggcgtctgggggccgttcttcggcgtcctttcattcacgctcctctttgtcgtgatgacgtccttcggtgtgagcgactcggggaagctcattgcccaaggtctcatcattctgcttgcggccattttctacggcctcaaggcgcgcaactagttgttatcggaggagtaaggatatggcagagagccgctcaatattgtgttttggggattcactaacatggggttggattccggtaccggagtcgtcgccgacgctcagatatccctttgagcagcgctggaccggcgcaatggccgcggtactgggtgacggctattcgatcatcgaggaaggcttaagcgcccgcacgacgagcgttgaggaccccaacgatcctcgcctgaacggcagcgcctatctgcctatggcgctcgccagtcacctgccgctcgatcttgtgatcatcctgctcggcaccaacgacaccaagtcgtattttcgccgcacgccctatgaaatcgccaacggcatgggcaagcttgcaggacaggtgctcacctgcgccggcggtgttggcaccccctaccctgccccgaagcttctgatcgtttcaccgccgcctttggctccaatgcctgacccctggtttgaagggatgttcggtggcggttacgaaaagtcggtcgaacttgcaaagcactacaaggcgcttgccaactttttgaaggtcgatttcctcgacgctggcgagttcgtcaagaccgatggctgcgatggaattcatttctccgccgagacgaacatcacgctcggccgtgcaatcgcgggcaaggtcaacgcaatcttctcacaagaggcgaagaacgctgccgcttagcagccttccgccgccggccgccagcgtctccctcccaggccgctggcggtcccctttcgtcaacaagatttgaggcttccatgaccggctatattctggcgatcgaccaggggacaacgtcctctcgtgccatcgtgtacggccccgatgcccagccgatcgcgatcgaccaaaaagagatatcacagtcctttccgaagtcgggctgggtcgaacacaacgccatcgaaatctgggagtctgtgcttgagacctcccgcaatgctctaaagcgggcacgcatcgaagcgcgtgacgttgctgcaatcggcataacaaaccaacgcgaaacatgccttgtttgggaccggtcgacgggtaagccaatccatcccgcgatcgtctggcaagaccggcggacctacggggcctgcgagatcctccgcgcagatgggtttggcccgctgatacaggaaaaaaccggccttttgttggacccctatttttccgccacaaagatcgcctggattctcgacaatgtcgacggtgcccggcgtgcggccgaggccggacagttgctgtgcggcacgatcgacacctatctgacatggatgctcacaggcggcgccgtgcatgcaacggacgccaccaacgcgtcacgcaccgccttgttcgacatccgcgagaaccgctgggatgacgaactcctgggcgcgttcagagtgccactggctctgttgccggaggtcaaggactgcgcggatgattttggtcaaacgatcgtcgcccatttcggcgctcaaattccgatccgggcgctcgcgggcgaccagcaggcagccttgatcggccaagcctgcctgaagcccggaatgctcaaatcgacctatggcacgggctgctttgtggtcctcaataccggcgatcagatcgtccggtcgtccaaccgcctgctctcgaccatcgggtaccgtctcaatggcaaaacgacctacgcacttgagggctcgatctttatggcaggcgccgccgttcaatggttgcgagactccctgaaactcatcaaggaagccgatgagacgggccgtcttgcgcatctggctgatgaacaggaagacgtttatctggtgccggccttcaccgggctcggtgcgccacactggaattcgcaagcccgtggcgcgatttttggcctgacaagaggaacaggaatcgccgagctttcgcgggcgacgctggaatccgtctgctaccagacgcgcgatttgctcgaggcgatggcctgcgattatccgatggaggtcaggggcgcgacccttcgcgtcgatggcggcctgtcgggaagcgattgggccatgcaggctttggccgactgcctcggcagcgacatcgagcgatcacaaaatcaggaagccaccgcctacggagttgcggcactcgcgggctcgcaggccggcgtttggcccgaccttcaaacctttgccgcgaactggaaggcgaaaagcaggttcacccccaacctcaacactgacgaacgggcacgacgctatcggaaatggcgcgctgccgttgcaagcacgctttcctatgcggcatcggcctgacgtcacgggagatcgatatggaagataagatccacgacctgttcgtgattggcggcggtatcaacggatgcgggatcgcgcgtgatgcggttggtcgcggctattccgtggcgctggcggagatgaacgacttcgcttccggcacctcttcaggcgcaaccaagctcatccatgggggcttgcgttacctcgaacactacgagttcaggcttgtccgggaatcgctgatggagcgtgaagtgttgtgggcgatggcgccgcacatcatctggccgatgcgcttcgtgctgccctatcaaaagggcggcatccgcccggcctggctgatccggcttgggctctttctctacgatcatctcggcggccgtaagctcttgccgccgacggcggtgctcgacatgcgccgagacgaagcggcaaagcccctgaaggcactcttcaccaaggccttcgaatattccgacggctgggtcgacgatgcccggctcgtggtgctgaacgcccgcgatgctgctgataaaggcgcgctgatcatgccgcgcacaaaggttgtctcggcgagacgcgagaatgggctctggacgatcgagacggtggatacggtctccggaatcgcgacggttcaccgcgcgcgcatgctcatcaatgcagccggtccctgggtcgatcatgtgatccgtggagctttcggcaagaacgaggctcgcaatgtccgccttgtccagggcagccatatcgtggtgaagaagaagttcgagggaccgcgggcctatttcttccagaaccccgacaaccgcatcattttcgccattccctatgaggacgagttcaccctgatcggtaccaccgaccgcgactacaccggcgatccaaaggatgtcaggatctcagaggaggaaacggactatctctgcaaggcggcgagcgaatatttcaaggaaccggtcaagcaagaggatatcatctggacctatgcagggatacgcccgctcttcaatgacggcgcctccaaggcgcaagaggcgacgcgtgactatgtggtcaagctcgagggggctgacggcaaggacgccaacacggcgccgcttcttaatgtcttcggcggtaagctcaccacctatcggcgtctggccgaacatgccctggagaagatcggcggggcgatcggcaccaagggtgccccctggacggccaagagccatctgccgggcggagactttccggttcaaggctacgaggcggaggtcacaaagctccagacccgctaccccttccttgccacttcgtacgcgcgccggcttgtccgccgctacggcacaaaggcatccgaccttctcgggactgcgcagaagattgaggatctcggccggcatttcggggcggacctctatgaagccgaagtgctctatctcatgcagtatgaatgggcacgcacgacgaacgacattctctggagacgctcgaagaaggggctccatcttagccacagcgaagtgtcccttcttgagaatttcatttctgaattcgtccagcggcaggttgccgcgcagtgagatttttttggcgggccatagcgcatcgatcctgtcggccggccgcctgacgtttgaggagttttgatgtcggaaaagatttatccggtcaccaagccggtggagagccatgcgctgatcgacaaggccgagtaccaggagtggtacgaggagagtgtcgcgagcccagagcaattctggggaaagcacggcaagcgcatcgactggttcaagccctacaccagcgtaaaggacacgtcctttaccggcgacgtcgcgatcaaatggttcgaggacggggagaccaatgtctcctacaactgcatcgatcggcacctgcagacgaggggcgatcaggtcgccatcatctgggagggcgatgatccctctgtcgacaagaagatatcctataacgaactcttcgagcaggtctgccgcacttccaacgtcttgaaaaagcacggtgtcaagaagggcgatcgcgtcaccatctacatgccgatggtgccggaagcggcctatgcgatgctggcctgcgcccgtatcggcgcgatccattccgtcgtctttggcggcttttcacccgaggcgctgggtggccgcatcgtcgactgtgaatcgaccttcgtgatcacttgcgacgaggggttgcgcggcggcaagccggttccgttaaaagccaacgtcgataaggcgatcgacatcgccgcgcgcggccatgtcatggtcaagaacgtcctggtgatccgccgcaccggtacggcagtcggctgggcgccgggtcgcgacctctggcatcacgaggaagcagcatctgtttcggctgactgcccacccgagccgatgagggccgaggatcccctcttcatcctctatacttcgggctcgaccggcaaacccaagggcgttctgcacacgactggcggctatctcgtctacgcctcgatgacgcatgaatatgtgttcgattaccaggacggcgacatttattggtgcacggccgatgtgggttgggtcaccggccactcctatatcgtctacggaccgcttgcgaattgcgcgacgacgctgatgttcgagggtatcccgaccttcccggatgccggccgtttctgggatgtcatcgacaagcataaggtcaacatcttctataccgcgcccaccgcaatccgctcgctgatgggcgccggcgacgatttcgtcaagcgctccagccgttcgagcctgcggctcctcggctcggtcggcgagcccatcaaccccgaagcctgggaatggtactatcacacggtcggcgacgggcgctgcccgatcgtcgacacttggtggcagacggaaaccggcggcatcatgatcacgccgctgccgggcgcgaccgacctgaagcccggttccgccacccggcccttcttcggcatcaagccggagcttgtggatgcggaaggcaaacttatcgaaggtgccgctgacggcaatctctgcatcgccgacagctggccgggtcaggcacgttcggtctatggcgaccacgagcgcttcatccagacctacttctccaccttcgagggcaagtattttactggcgacggctgtcgccgtgatgccgacggctattattggatcaccggtcgcgttgatgacgttctcaacgtctctggccaccggctcgggacggcggaagtcgaatccgccctggtttcgcatcacctcgtctccgaggccgccgttgtcggctatccccacaatatcaagggccagggcatctattgctatgtcacgctgatggcgggcagcgaagggtccgaagagttgcgccagcagctggtcaaacacgtccgcgcggaaatcggcccgatcgcttcgccagacaagattcagttcgcgccgggcctgccgaagacccgctcgggaaagatcatgcgccgcatcctgcgcaagatcgccgaggacgatttcggttcactgggcgacacttcgacgcttgccgatccggccgtcgtcgatgatctgatcatcaaccggcagaacagggccgaggcagcctgagacccaaggaaaggacttatccatgagattgatactgatgggcccgcccgggtccggcaaagggacccaagccacgcgcatctgcgagaagctcggcatcccgcatctgtcgacgggcgacatcctccgggccgaggtaaaggcgggaacgcctctcggttcggcggtcgcggctatcatggcagccggcggactcgtttccgacgataccgtctcggcgatcgttgccaaccggattgccggtccggaggctgagcggggctttgtgctcgacgggttcccgcgcacgatctcgcaggcagccgcgttggaacaagcgctcggcgagcaagcgttgacggccgttgtcgaactcgtcgtccccgaggaggcgctctttgagcgcatccgccggcgggccgacgaagccgtcggtgcggggggaccgcagcgcgccgacgataatgccgcgacattggaattgcgtctgagggcgtatcgggcagaaaccctctcggtcagcgaattctacaaggatcaggcgccgtactttcaggtcgatggtcttgcctctcccgaggatgtgaccgcgcggatcttggagatcctgaagacggccgagatggaatattcctgaaacattactaattcaaaatcaattttacctaatattcattcactcagaataattattattggacctcgttatcttgggtggagaatcatgggtattcattttgacttcctgctactgcgcggaccgatccggacaaagatattttgccttctgacgccgatacttctcggcatcgcgggtctgagctttgtgaattatgtgtccggcaacatgttgaacacccagctggcgagcagttcgagcggaatgatcacgctgtctgcgatcaagcaggctcaggacggaatgaactccttcctgctcgaggcgacggaggcaaagcgcgatgcgctgaagtcactgctcgacgaccagtccgccaagatatcgacgagcttgtccttcgctcaagagcaggatgaacgacagagcctgcttgccgccggaacgattgccgaagaggtctcgcagacgatcgacggcctttgggaaatgcacagcgacgaaaggaaacttcgggacgggatttccagcgatctcgcaaccttgtcggatgtgcagtccaaactgcaaacctatctgaacatccccgctgaccaagcggcagcacaagcggcgacggcggaaacgctgaacaagatcaattccatgaactatgaacttcggatcgcctcctccgattttctgggtggaatgaatgaagacaccctcaagaaggtaaaaggtcgcctcaaagggctgggcttctatctcggcaaggtgaaagaacagcacgcggccaacggtcccatccaggaactgtccgataaggctgttgcggtgattggtcaggcgcaggaggcattcgatcagctcctcgtcaaggtcggggctcgtgacgcggcattcaaggcggcgagcgccaggatgaacgactcttggaacaagatcctcgagttcgcccagatccagcgtgatcatgcctccgccgcacaggatcgggcgcaacacatatccgccgtgacgaccgtgattgccctgcttttcggctgcatcgctgctttcctgctgctgcgaaccatcaagtctccgatcgaagcactgactgcatcgatgaaggcggtcgcgtccggcaaactcgacgaaaagatcggcagcgtcgaaaagcgcgacgagatcggcgaaatggcgagggcattggacgtattccgtaacaatgcgctcgaaaaaatccgcgtcgaaagtgacgcggaacagtcgaggtcgctggtgcggcaacaacgccaggaagacgatctgcgcaagacccgcgatgcggctgccatcagcagcgcggtcgaggcggttgcgtccggcttgcacaaacttgcgagcggagacctcacggtgactatcgctctccctctcgacggagagctagaccagcttcgacaggatttcaatggctcgatgttgcacctgcaggcgaccatgcgccagatccgcgataatgtcgaaatgatccagggcaacggcaaccagatggccgaggcggctgaggatcttgccaaacgtaccgaacagcaggctgcttcgctcgaagaaacggccgccgccatcgacgagattaccgtcacggttcgctcgtcggcggagcgtgccaaggatgccgaccagatcgtccgccgggccaagcgcagcgccgacgactcggcgatcgtcgtcaacaatgcgatcgacgcgatgggccgcatcgaagacgcctcccgtcagatcgaacagattaccggtgtcatcgacgagatcgcctttcagaccaatcttcttgccctgaacgccggcgtcgaggcagctcgtgccggagaggctggcaagggcttcgctgtcgttgcccaggaggtgcgcgaactggcgcaacgctccgccaaggcagccaaggagatcaaggtcctcatcaacaagtcgacgaccgaggtcaataccggctcgcatctggtgcaggaaaccggcgcggtccttgcgaagatcagcacgcagattgttaccatcagccagcacgtcgaaacgatcgcccgtggcagccacgaccagtcgagtgccctgcagggggtcaactccaccgtcaatcagatggaccagatgacacagcagaacgctgcgatggtcgaggagacgacagcggcgagccgcgaactcgcctcccaggccgacggcctcctcgcgctggttcagcagttcaagatcgaaggaaatggacaagaaatgagtttctcaagggcgacggctgggaaagcagaagaacagtcgcacgacatggcgtctggctccaaccaaagcgcggcttgaggttgcaaccgaactgcatatggcgtgacagaactgcatctgaagcggagtagcgaaatcggatccccagggattcacatgacaggttggacatcgacatgacgatcacatcagacaccgaacttggcgcctatctgcgcgagaggaaagtcgacctcgcacttgcacgcttggttgagagcatagcagcgtctgcaatcgtggtcgctgatcatctgaaggaagcagcctttcagaaccagatcggcagtgccggaacaacgaatgtccagggcgaagatcagaagctcctcgatgtcctggctgaccgcgtatttcgcgaaacatgtgccgaggcgacatcactcgctgcccacgtctcggaggaagccgaggacgtcacgtggttgaaacccccttccgcaggggacctcattctatacctggatccgctggacgggtcgtcgaaccttgaggtgaacctttcggtcggttcgatctttgccgtgagccaggtgctcgcagacggcgatagcaatgttctgcgcaaggggcgtgactttctctgcgcgggatatgccatttatggtccatcgacgatgctggtgatgacatttggtgtcgaagtcgttggtttcacgctggatccatccgatgggcaattcaaactgaccaatgcgcgcatgcgagtaccgcaggagacgaacgaatttgctgtgaactcgtcacgtcaacgcttttgggacgagcccatccgccgctatgtggacgagtgccttgagggcgcggcagggccgcgcggaaaagacttcaatatgcgttggacagcctccatggtcgccgacgtccatcgtatcctcacccgcggaggcgtctttctctatccggcggacgattccaatcgccgcgccggcggcaagctgcgcttgatgtacgaggccaatccgatggcgttcctcatcgaggcggccggaggtgcggcctccaccggaaccgaagatattcttcgcatccaaccacaggctcatcaccaacgcgtgtcggtgttgctcgggtcgagcaacgagatcgaacggctggtgcaatttcaccaaatccatcactcgcaagaggagatcggctcgtaaatggctctcgtcacccttcgtcaattgctcgaccactccgccgagcacggctacgccatcccggcattcaacgtgaacaacatggagcagatgcttgccatcatgaaggctgcggcccgcaccgacagcccggtgatcatgcaggcaagccgcggcgctcgtgttttcgcaggcgacgcgacgttgtcgcatctggtccgcgccgcaatcgagatgtatccgcacatcccggtgtgcatgcatcaggaccacgggaattcggcgtcgacctgtatgtcggcaattcttgccggtttctcttccgtgatgatggatggatccctgtcggaagacggtcgcacgcctctcagcttcgatgacaacgtcgccgtcacctccaaggtgtcggaaatggcgcacctcgtcggcgtgtcggtcgaaggtgagatcggccatctcggctcattggaaagcggtcgtggcgaagcagaggatgggcacggctttgacggcgaactcagccgcgacatgctgctgacggatccggaagaggccgccgaattcgtgcgcttgacgaacgtggatgctctcgccatcgccatcggcacgtcgcacggcgcttacaaattctcccgcaaaccggacggcgacatcctttccatcaagcgcctgaaggagatccacgcccgtctcccagatacccatctcgtcatgcatgggtcgtcatcggtaccattggaattgcaggaactgatcaacgcccatggcggcgaggtcaaacccacctatggcgttccggtcgaagaaatccaggaaggcatccgccacggcgttcgcaaggtgaatgtcgatacggacctcagattggcgtttacgggagcgatccgccgcgtctttgcccttcatcccggcgagttcgatccgcgcaaatacctcgcccccggcatcgaggctatggcagcggtttgcagcgatcgatacgagcagttcggcgctgccggacatgcctctgccatcaagcccctgccgcttgccgagatggcgaagcgctataaccactagttgggggcagatcatgaccaatacatcccgccggctcatcgtcggtaactggaaaatgaacgggctcacggctgatctcgccgagatcgaaaaggtcgcctggaacatcggcgaactgagagcggacgtggtcatatgtcctcccgcaacgcttctgcaggccgccgcgaggataaccgccggaagccgacttcttctcggcgcccaggattgcagtcctcaagaaggcggtgcgtataccggtgacatatccgccaggatgattgctgactgccgcgcccgcatcgtcatactcaggcattccgagaggcgtcagtatcagggagagacggacgcgatcgtcaggcgcaaggccgagactgcgctcagggccggtttgatccccgtgatttgcgtgggcgagacggaagcggagcatcttcgtcaggaaacgttggccgtcctgaaaaaccagttgcagggttgcctgcccgccgaaacaatggaaaccggcctggttatagcctatgagccggtctggtccatcgggacaggtcgtgtgccggaccaaagcgaaatactctccgctcatgcacgcatccggaccagcttgatcgacgcctttgggtcggtcggagctgggctgcggatcctttacgggggatcggtcaaacctgaaaattcggccgagattctttctcttgaaaacgtcgacggtgttcttgtcggcggcgccagtctgcgtgccgagagctttcttcagatctgcgaggcgaccaggacctaggtcacccgcccgttctgttgccgaagtccgagacaaaagtgtcgggcggacgatccacccaattgtgcgagaaatcacaagagagaagcaacgaaagcgggtgatcatgaagtcatggatgctttcgccctttgaaaagtcctgccttcggtgggtgtcgttgggcaagaccgtcgaggaaatcgccttgcttcagggcaagagcgtcgtggaaatcgaaggttacctggagaatgcgattgccgcgctcgaggcaacctcgatgcgcgaggctcttgagaaggcagacctttcggagcccgattgatgttgggccaatcactgcttcggctcagcgacagcggagccggccctgcgcccgctggtcgcatcctcgtcagggcaatggctgcgacggaaatgaaaagttcccacggggacgcacgggttctagtcgctcgcatcccgcggcgagaaccgagttttggagagtctattgcagcatgccgcactccgacatggtaacattgtgcaggccgacccgactagctgggcggaccgcgaccacgtgtcttcgaccggagacagacactacatcgtcggccgtttcagcgcctggaagggaaagtgccgttcagccctgaaacttgccttcgatgacgcccccgacgcattcgttctttacctgccgtcctccaccgcgccggagatacgtgccgggacacaacgcttccccaagacaagagccacaggttttctggaggatctcgcgcacttcgacgaactgacccctcatgaacattccagctatatcggcctttccttcgaaaaagcggcgatggtgcagcaagtgagtgaactgctggctggtcctgtcacgacggatctcgaattcgatcgtattgtcgatctgaccagcgagaaggggttgcggttggcagcactcggccatcttgtctggagttgcctcaatctttcagaagcagaccgactgtcaccggccgccatcgagcggctgtttcaggcgacgatgatcgcacttttggaggttgctcccaacagctatatgccgcgactggaacggccggtctcgccggcagtcccctggcaggtgaaacgcgcgatcgagtacatgcgcgcaaacctgtcgcactccctgactgtcgcccttatcgcagacgagacgggaacgagcgtcagagcactgcaggtggctttccaacggttcaagggcaccacgcctttgggctatctgcgaacgatccgcctggaggctgcccgcagagccatcatcggcgatggcggctcacgatcgattgctgacgccgcacgcaacgcagggttcgcccacatggggcggtttgccgccgcttattatcaagcttttggcgaaacgccgtcggatacgctccggatgcgttgagttgccagccaaagcggcgcctgaaagcggaaaagatcgttactgctgatgcggcgagaaactgccgcaggttcgagtggcatgcgtggatacatctccttcgggagcagccaatcccgctctttggtgatggcgtcctggcccagcgccggatcttcacgatcaacccataaagggtccgctagcaagctgcggccgcttcgacttcgtctcgcggtgatcgcgcccgtcgccgggccttttgaggagccatcgagcgggattggcccgctcccgaaggagcctcttcacatgtcgcacgatcttgtcctcgctcagtcccacgccttccagctttcccgcgacctcatggtcccggtcaccgtctttgaagtcgacggcgaatacggcgtccttccctctgacgagatcgacgccgatgatgacctcgcggtcattcacgagttcctcccctgggtggctcattgagccgccttttttcgttctttgggccctgccagctgccgcttgcgagcggcaggccgcaagggaggcttcgccgcggtcatgtattgcatgatccgacaattgtcagccgcgcccttgccgcctttgctcttcgcggctggtggaagtccgcccgcgaagcgacggggaaggaaggcaaagaggaaagagcatgaacagaaaggatattgaggcgcttcgcgaacaggtgagctgtgccgccgcgcttgagcatgcgggcttcgccatcgatgcgaaggagagtacccggcgggcggtcaagtttcgccgagggagcgagatcatcatcgtcacccatgaggggcgcggatggttcgacccgctcagcgatgcaaaaggcgatgtgttcggacttgtcgaacatctcgatcatgtcggttttctcgaaggcgcggggagggtcgccgacctcgtcggtttcgcgatcgcggagccggaatggcaggcgcctcggcgcgttcacggccatgacctttctctacccgagcgttggcaggcgcgccgccgtccgtggcccggctcttcgacatgggcttacctatgcggcgagcgtgtcctgccaaccattttgctccgcgcgacaatccggcaagaccgcctccgggagggtccctatggcagcatgtgggcggcgcatacggacaatgccggcattgtcaccggctgggaggcgcgagggcctgagtatcgggggtttgcctccggaggaacgaaggttctcttccgtctggggccggacacggcgttgcgcctggccgtcactgaagctgcgatcgacgccatgagccttgccgccatcgagggactacgtgatggaactgtgtatctgagtaccgggggcggatggtcgccgtcaacagagggcgcgctgcggcagctggcctcgcgagccgatgctcacctcgtcgccgcgacagacgccaatccccaaggggagatgtttgccgagcggttgcgcgcgctcgcggacgaggtcggctgcgactggtcgaggctccgcccgcccgaggaggactggaacgagaccctgaaaatcagggaggaagaaaaatgggaaagaaaggaaggcggcgtgccgcattcgcgccgcccgcgtcaagggaagcttcgcccggcggagccggcccttgacccggccggccgcgatgccggcggcccgggaggtgtcatgaaggactgaagaggatggcaaggtcgaaaggacagtgctcacgcttcggtccggacccatctcgaaggagccgcagatgatcccctctcccgtaattcgcaaagtcttccagggcgtcgcgtcacgccagcaaatgttcaagatgtttaaccggcacgtccagcgtccgaaccgttgggacggtgacgcctcgccgctttatgccggcgaatggttcgagaccggcgaggccgagcatgactacatgttcgagatcctgccaccgctctggatccgcggagccatgtttgcaatgcgcgagtttctgaccggttcggtgacatcagtgttcttcgccttgcggatcgatggcgtcatccggaatttccatggctattgcgatctctccgacgggcaagctgtcgagcgcatgcgcgtggcaatcatcgagcgcgaaagccggccggtgcgcgccatgacgcgcgaggaacgcctggaacatatctggagcatcacggccgacgactatcggggctatgccggcgatagctgggccgaagccgcgcgctgccagcgcacgatcatgctctacggtggggcagtgggcagcaccgcgaaactgctcgacgaactgaccgacgacgaaatcgcggcgaagctgcctgtgcaactgcgccacctcccctcgccgattgccgcatgaaggaggcacactatgctctccttcccgctcacatcagtccgcgaggtgatcgcccgcggtcgcgccgacgcagaagcccatggcggctttcgcaacccctgttacggcctgcgccctggcaaagaccaacagccgggtctctggctcgtcggagatcacggggtctatctgatgtccaacggcaaactgcccgagggtgccaaacctttggtcatctatgccgaggaatgtgatccccgcatccatgacgattggttcgaggtcaaacgccggacattcggcggcgatgacggcgtcgatttcacagacgcggaacagctcgaagccatgatggcggcggccccggaggcgacgcaccttcacatcgcatttcttcaggactcgatgcagctctccctgatcgcgaagccctagaatttcgcgaccggcccgaccccttcggtcaccagtccccaaaaacctgagcgtccttgaatcccgtcggtgctttccgcggggcgatgacgctcgccatttcccgaggaaaactccatgagcaacgatcccttcactctcgacatgtttggcagaagcgcgctgtcgtcaggcctcggcctgggtattacagcattcggcagcttcgacccggtcgccgccaacgacgacgaccccgaaccgacgccgccctctcctgccccggccgtgccggtaaaggcgacagaacgtccggcgccccggcggcagggcaaccggtgcaacttctacctcgacgatgcggatcgaggcttggccgtatcctggaaggatcgcgcccgcgccaatgttgcggcgatcctgatcgcaaacaacatcgagaagcaggatcgaccagccaacgcgaaggaacaggcgcaactcgtccggttcaccggcttcggtgcctcggagctggcgaacacgatgttccgccgccctggcgagatcgacttccgcgacggctggagcgagctcggcggctcgctcgaaactgctgtttcggacgccgactacgcgtcgctttcccgctgcacgcagtacgcccatttcacaccggagttcatcatccgggcaatctggtccggaatccagcggcttggctggcgtggcggccgggtgctcgagcccggtatcggcacaggcctgtttccagccctgatgccggtggcgttccgcgacgtgtccttcgtcaccggcgtcgaactcgaccccgtcaccgcccggatcgtcaagctgctgcagccgaaagcgcggatcatcaatggcaactttgcgcgcagcgatctggcgccgatctatgatctcgcgatcggtaatccacccttctccgatcgcaccgtccgatctgaccggacctatcgttcgctcggtctcagggtgcacgactacttcatcgcccggtcgatcgacctgctcaaacccggcgcgctcgccgccttcgtcaccagctccgggacgatggacaaggtggatgcgacagcgcgcgagcacatcgccaaaaccgccgacctgatcgccgcgatccgcctgccggagggcagcttacggagggatgccggcacggatgtcgtggtcgatcttctcttcttccgcaagcgcaagctcggggaaccgacaagcgatccgtcatggctcgatctcgaggaggtgcggcccgaaagccaagacgaaggcgcaattcgcgtgaaccgctggtttgcgcgacatccagagttcgtgctcggcgatcataacctgacctctgggccatttggcgaaacttacacctgccggccgcgggccggcgaggacttggaggcggcactgcaggaggccattcgcctccttcccgaaggccgctatgacggcgagccgaccgcaatcgacatcgaccttgaggacgagctcggcgagatcgtcgatcttcggcccgagaaccgacaggtcagagaaggaagtttcttcatcgatatcagccgcggtcttatgcagatggtcgacggcgcgcctgtcgaggtcaaagtccgcaaggggcgcaccggtgacggcatcccggaaaagcacgtcggcatcatcaagaagctgattccgatccgcgacgccgtgcgcgaggtgctgaaggcccaggaacaggatcggccatggcgtgaactgcaagttcgcttgcgcatcgcctggtcgagcttcgtgcgcgacttcggaccgatcaaccacaccacggtctcgatcagcgaggatgaggaatccggcgaggtgcgcgaaacgcaccgtcgtccgaacctgcagcccttcctcgacgatcccgattgctggctggttgcctcgatcgaggattacgacctcgacaccgatacggcgaaaccaggcccgatcttttccgaacgtgtgatctcgccgccggccccgcccgaaatcaccagtgccgaggacgcgttggccgtggtgctcaacgaacgcggtcgcgttgacgtcgagcatatcgccgaactgctgcacaggccggccgacgcggtggccgatgaactcggcgatgcgatcttccgggatccggccgacggatcctggcagacggccgacgcctatcttgccggcccggtccgcaccaagcttgctgttgttgaagctgcggcggcgctggttccagcctacgagcgcaacgtccgagcacttcaggcagtccaacccgccgaccttcgtccgtccgatatcaccgcacgcctcggtgcgccgtggattccggcgagcgacgtcgtcgccttcgtgcaggagatgatgggcgcggagatcaggatccaccatatgcctgagcttgggagctggaccgtggaggcgcggcagcttggttatagcgccgccggcacatccgaatggggcaccagccgccgtgacgccggcgaactgctggccgatgcgctgaacagtcgcgttccgcagatcttcgacaacttcaaggacgccggcggcgagcggcgcgtgctgaatgtcgtcgataccgaggccgcccgcgacaagctgcagaggatcaaggaagctttccagaactgggtctggaccgatcccgatcgcaccgatcgtctggcgagggtctataacgaccgcttcaacaacctcgcgccaagacgtttcgacggcgctcacctcaaacttcccggcgcctctggcgcctttgttccttatgggcaccagaaacgcggcgtctggcgcatcatctcctcaggttctacctatcttgcgcatgcggtcggcgccggcaagacaatgacgatggcagctgcgatcatggagcagcgccgcctggggctgatcgccaaggccatgctcgtcgtccccggtcattgcctggcacaggcggcgcgagagtttctggcgctctaccccaatgcccgtattctcgtcgccgacgagacgaacttcaccaaggacaagcgagcccgcttcctgtcacgcgcggcgactgccacctgggacgcgatcatcatcacgcactcggccttcaggttcatcgccgtgccgtctgccttcgaacaacagatgatccacgatgagctggagctctacgaggatctgctgaccaaggtcgacggcgaggaccgcgtctcgcgcaagcgcctcgagcggctgaaggaaggcttgcaggaacgcctggaagggcttgcgacgcgaaaggacgatctgctgaccatctccgagatcggcgtcgaccagatcatcgtcgatgaggcgcaggagttccgcaagctttccttcgcgaccaacatgagcacgttgaagggcatcgatccgaacggctcgcagcgcgcctgggacctctatgtgaagtcccggttcctcgaaacgaagaacccgggccgcgccctggtgcttgcctccggcacgccgatcaccaacacactcggcgagatgttctcgatccagcgcctgctcggccacgaggcactcgccgatcgcggtctgcacgaattcgatgcctgggcgtcctgcttcggcgatacaacgaccgagctcgaaatccagccatccggcaaatacaagcccgtgtcgcggttcgcgagcttcgtcaacgtcccggagctgatcgccatgttccgggcctttgctgatgttgtcatgccggcggatctccgcgaatacgtcaaggtgcctgaaatctccaccggccggcggcagatcctgaccgccaagccgacgcctgccttcaagacttatcagcagatcctcgatgcccgcatcaaggcgatcgagatgcgcgaggggccggcgcattccggcgacgatatcctgctctcggtcatcaccgacggccgccatgcggcgattgatcttcgcctcgtcatgccggccaacgacaatgaggaggataacaagctcaacctcctcgtccgcaatgcctttcggatttggaaagagacgagcggggccacgtatcttcgcccagacggcaagtcctatgacctgcccggcgccgcgcagatgatcttcagcgatctcggcacaatcaacgtcgagaagacccgcggcttttccgcttaccgctggatccgtgacgagcttgtccggctcggcgttcccccgtccgaaatcgccttcatgcaggactacaagaagacggaggctaagcagcggctgttcgccgacgtgcgcgccggccgggttcggttcctgatcggatcgtcggagacgatgggaacgggcgtcaacgcccagctccggctcaaggcgttgcaccacctcgacgtgccgtggctgccgtcgcacatcgagcagcgcgaaggccgcatcgtccggcagggcaatcagcacaatgtcgtggacattttcgcctatgccacggagggcagcctcgacgcttccatgtggcagaacaacgagcgaaaagcccgtttcatcgcggcggcgctgagcggagatacttcgatccgccggctcgacgacctcggtgacgggcaggccaatcagttcgccatggccaaggcgattgcctccggcgacgagcggctgatgcagaaagcgggtctcgaagccgatatcgcccggttggaaaggctgcgcgccgcccatgacgatgaccagtatgcggtgcgccggcagatgcgcgatgcggaacgtgacatcgaggtgtcgatccgtcgcatcggcgagatcgctcaggatatcggacggcttgtgcccacagcgggcggcgcgtttgcgataaaggtccttggcaaagactacgatgagcgcaaggaggctggtcgcgcgctgatgaaggaaattctcacgctcctccagctccagcaagagggcgaggttcacctcgcatccatcggcggcttcgatctcgtctatgagggcgagcgcttcggaaagggtgatggttatcgctacgcaaccacgctccagcgcaccggcgccgactacgagatcgatcttgcggtcaccgtgacgccgctcggcgccatttcccgcctcgagcatgcgctcgacgggttcgaggcggagcgtgagcgctatcgccatcgtctggatgaagtacaccgccggctcgtctcttatcgctcgcgcgatggcggcactttcgctttcgccgacgaacttgccgagaagcgccgacagcttcgcgacgtcgacaatgctcttgccgcagcgtcaattcaaaacgacgacgccccggcggaggctgcttgatctggagcagcggttttgatgcaacgcagcatttgcatagctgcattgcacaatatttgctttccttccgatcgaaatttgagcatagtgctcgcagctgatgcacatggcggatttcctcccagtgccgccgcagcagctgttcccctctggaggtttaattaccttcatacctatagggccacgagttttctcgtggccctctttttttgtcgtgatttccgtttgtcgatgcgacaaccatgacgatcgcgtcgtcggcggcctcaccgcgctcaggaaatcagctcgacacgctcgatcgtttggatcagccgcgctaccgcatcctccgggtggttcaggacagtcacgacatcggagggactcggatccttcaaacctactttgtagatcgcaatcccagcatcgacattctcgtccatagccttcagcccctcgaaatgttgggaggcctcctgccgggcgagccccaaagtttcggtgaacaccaggatctcgtccgttcccggaaccacctgataggcaaatatctgtttcgcatcgtgcatcggaacctccttgagctgcgacagcctaaggcgcctttccggttgctgtgaactattaaaagtatgagcggcagcgtcccgaaggtgggaggacaaaaagaaggaagcggagaaagaaaccggtcgcagatcggtccggccgtcgtcgcttgtgctcaaccgccgcctccgcatcccggccacttgtcccgcgcagggctgggagccccgcttgtccttcgcagcagggacgcccggccgcagttgcgccggtccgcccgcccccggtccgggaggtgtcttcgaaagaaatgaagacaggaaggaccggcaagagagccgcgtcccgcatcccggaaaaggaaaatcccatgcacatcataaaggtcgatccgcgctcgttgaaggacaaccccgacaacacccgtcagtcgaaatccacgccgcaggccgatgccctgttgctcgccaccatcaaagctgtcggcatcatccagccgcccgtcatctttcccgaggtcggtggcgggaatggctacgtcatcgaagccggccatcggcgcacccgcatggcgatcgccgcgggcctcgaagaaatcgaggtcctcgtcgtcgaagccgccaatgataatggcgccatgcggtcgatggtcgagaacatcgccagggagccgctcaaccctgtcgaccagtggcgcgggattgaacgcctgatcgcactcgattggaccgaggaagcaattgccgtcgcgctcgccctgcccgtccgacagattcgcaaattgcggctgctcgccaacgtgctgccggccatgctcgaccagatggctctcggcgacatgccgaacgaaccgcagcttcgaacgatcgcggccgcacacctcgatgagcagaaggaggtctggaaggcacagaagccgaagaagggccagcctgccacatggttccagatcgccaacgcgctgagcaagacccgcatgtatgccaaggatgcgagcttcggcgacgatctgagggaagcctacggcatcgaatggatcgaggatctgtttgcccctgccgacgaggacagccgctacaccaccaacgtcgaagcctatctcggtgcacagcaggaatggatgaccgacaatctgccgaagaagggcgtgatcgccgaggtcacgcaatggggcgaggcgaagttgccgcagaaggcaagccgcgtctatggcaagccaagcaagggcgaccacaccgccatgtacctggatcggaacggcaaggttcagaccgtccattaccggatgccggaggagaagaagaccgcgggcaaaggaggcgtcgttggaggtggtgccaccgctggcgacgatgtgatcgacgcgccgaagcagcgacctgatgtcacgcaaaagggccacgacatcatcggtgacttcaggacggacgcgctgcacgaggcgctcgcccgcgcgccgatcgaggacgacacgctgatggcgctcctcgtgctcgcctttgccggcctgaacgtccgggtcgattccggggtaaatgacaccgtcttcggtgcgaagcggtttgcgcgccacgccgctcggctgatcggcggcgagggcaaactgtccttcggcatcgacacattgcgggtcgccgcgcgctcgatgctggtcgatgtgctgtcttgccgtcgcggcatgtcgaacagcggtatcgtctcgcgtatcgccggcgaggccatcggcgcggatggatatctcccgaacatgggcacggaggacttcctgctttgcctgtcgcggcaggcgctcgaggcgtcgtgcaaggataccgcggttctgccgcgccaaaaggtccgcgagactcgcgcagcactcgtcgagcacttcaaggaagggcatttcgtccatccgacagccttgttcgcgccagacccgaaggaacttgccggactgctcaagcaaggcgagatcgtcgaagaggaagacaccgccaacgccgtggaagcgacggatggccttgaagacgagctcgcggacggcggcgccgccggcgaggccgccgatctcgacgcccccgatccggaggccggtgacggtgctcccgacgaggatgaaaccgcctacggcattgcggccgaatagtcactcttcccttctcatccgatcgacacccgccgccggcctcaccggcggcggtcttgtttccatcaaccgcagaatttcaaggagatgtctgatgtctgcgtccctgatctacgacctcgcctcgatcggctccatcgtcgcttggtccgacgggcacaccacgcccgcccgggcgttttaagaagaagctggcgtcctggcagacccgcaacaacagcggccgcttgatccgcaaggaaggtccgcgccaatccggcaactgcgcctcgccgggatatttcacgctgcatgaggcggccttcggcggcaagaataccgtcgtcatccgcattcaccgaaccttcggtctcgattcgaacctgaccttcaaggttctcgaacgccccgagctcggttctatccgcgtcttcgatcgcgccagcgcgaacgccgagctcgtccatctcgccgacaatcgcgagacggctgcgacctggctacaagagcatggatacccgaacgctgtccttgaagaggtaaccgccgacgagattgcggcggctcatgtcgaagggagggttgccggatgagcacgcccgatcttcaatacgacagggttccaaccgccgatgacccgtcggtggaattcggcaccagcgccgacggctttccggtcgcccggatcgccgatacgctcctggcaatggtgccggcgcgcgatggcgccagcttccttgcgaacgcctggcgcctcactcgcccgctgtcagagctgacacgggcggatttccacggtcgcgaaggccgccttagagatgaggcagagtttcgcgcgcgtgtgttcgagaccgcgcggcacagccatgaacgatccgcgctcgggcggatccagacccgcatggcagcgagtacgccgtggggtccgtcgcagctcgcaacgatctatgccgaggggatcgtctcccatatgacggccggccaacgcgggtttcatctgtcggccgagcggaatgcgtgcgtccttcccatgctgcgaaagttctcgccctggtacgaggaagacgcggaatgggcgatcgtcgccctcaccttcccagacctgttcacgtcctacgagcgcaaatgtgccgacgagacgatccgcaacagctcgccgtccgcctgggaggagatccacggccgcgaactggcgcccggccaatcctggacaaaggaccgagaagccttcgagcgcaagtatgccggcgactggattgtgatctccgcgatcttttcgagccaccatgccgacatgacagaggtggtcgcgacacggggcggcaggcgcgatgggcgggcggaggagatgcgctttctcgtgctccgcaccgaatacgccgcgcgcgaccgcttcggtttcgtcatcgatcccaaccgccacgatctctatgacggcccttccagctttgtgcgttggcaagggagggttgcgtgatgactgcaacgccaatctaccatgcgcaactgtcgcgtatggaagaagcgcggcggcagacgcagcgccagttggaactgatcgatcgccaggtcttgcgccggatatcatcgatcctgcctcagctcgcgcgccggcaaaccggatatcggcgcgggaaggcgccggatgccggttctttcctcgaacgctatcgcaacaatctcgccgcccctgacggcggagcgtcagctggaagttgatgcgttgacacgaaaactggcccgacaggatgctgcgatagctacctttcgaacacggttcgaacccgttggtgacgcggctcagccacgagaggaggtctagcgccatgggaacgatcggagacctcgaacggagagcgggcattgggcaatcgtccgcggagcgcaccgcgttctggcagcagttccaccacctcgccggacaggcgtgcctcgacgctggcgtggcggagctcagacgaatgatcgccgcgaaggaggggctggctcaagtcactccgagtaggcgcagcggagtttcgaaacgcgaacggcttcctcctttgaccgctgaacaggacgcagcactcaagacctatgccgtaaaacacgggcgtcgctggaaaagcatcctgaaccacgtctggatgggtggcgcgccctatgacgatggcgggacactccgcggtcttcgaaacacgcacggtccgagctggctgcaatcttaccggcttcccaagccgaaaccttcggccgagaccctcatcgcgccaattgagcgtgaggcgagttcgggaggtgacgacgtatagcgtcatcggcagccatattcctctcaacacctggttggactggagccgtgccggtttgccttcggttttgctgcggtctgaaccagcggccggtcgcttcaaggccgctttgcgccgcgaggcggccggaaccgccgtccttcacggagcaggctcgcgggcgtcgcagggcaggatgccccgcttgcccgcaaaccggctccgctctgcctgtcgtctccggaccttgaagcgcccgtcttccgccggttcgaggcgaccgcaccgaacggcaagccggcatggggccggagccgcttcgaggtgaaaggaagaaatcatggcaaagcccgctactccccctcgtcagtccgcccgcgtcgtggccctgcgcaaaggggcaaccctcgaaatggtccggctcacatgccccgacagtgcccaggcgctgaagatcgccgagagcttcggaaccgcgatcgtcgatagcgacggaatccgtgatctccatgagcgcctcatctccgagacggccgatgctctgagcgatggcctcggcgaaaaggccatgcagatccatctgcagcggatcgtcggcgcttttgtcggttccgcgcacggtgcaggccagttctatagccgcgccgtcaccgaggcgcgcgacgccacggccaaagcggccaacgacgcccgcgacgaggacctcgacggccctgtcggctacgacagtgctgcccagcgcagacgcgagtttgccgccgacatgggcgtgcaggctcatgcgcttcggatggcggcggagggcgccgttgcggcatacaagcaaatcgtcggcgagacctggaagcccttcgatcgccccgtcgaaaatccgggtcactctctcgatcgcaaggcggccgaggcacagatatcggccttcgactaaagtgcttcttcggcggggcttcggctccgccttttccatgacgaggagcaagccgccttggaaaagctcgcacaatgatctacattagtttcgagaattatctacatggaggcggctcatgccgatcaatgtcaacaatccggaagcagacgctctgacgcgcaagttcgccgagatggccggcgtcggcatcaccgacgcaatcgtgattgccatgcgagaggcgatcgagcgtcgcaatcgcacggaaacgccattgcagacagcggcgcgcttgcgggaaaagcacggggttgcgttgagcgacgacgtccgcaagcctcttccccgtgaagccttcgacgaaatgtgggatgacgcctgatgttcgtcgatgcctgcgcgatcattgcgcttctgtccgatgaagcggaagcggcgcgcgtctccgacgccgttgcttctgccaggcacccattcacgtcaccggtcgccattctcgaaaccgtcctcggtcttgcacggccggacaagttcaatcttccagtgcccgcagtcgaaacgatcgtaatggaattcctcgaagcgcgggcaatcgaggttcgcgatctcccgcccgcatccgagacgacgcggctcgcccttgtcgctgcgcaccgctatcgcagcggtcgccatggcctgaacctcggcgattgcctgcattatgcctgcgccaaattccatggcgtcccgatcctcgccactgcgaacgagttcagatcgaccgacctcgaaaccattccctgaagctaatgaagcagtgacgccgagatcggcccgtcgcgaccccgcccggcttttggtcctggcggagcgaggcgttcgggcaacggcttcgccgtcctccacgtccgttccggcctgccggtgccctcacaccttgccgctccgccctttggaccgccgtgacggggtcgcgatcggcgcgacctccttgaaatggaggtttgaaatgagcaggaaggacgaaggccaacgcgccgacatctacacgcggatcaccgacaagatcatcgaggatctggaaaaaggggttcgcccatggatgaagccgtggagcgcggcaaacgcgaacggtcgtattacccggccgctgcgccacaacggtcagccctattccggcatgaatgtgctcctcctatggtccgaggggatggcgagagggtttacctctccgatatggatgaccttcaagcaggcgctggagctcggcgccgcggttcgtaagggcgaaaccggctcgaccgtcgtgttcgccagccgcttcaccaagtcggcgaccgaccgcaacggcaacgatgtcgaccgggagatacccttcctgaaggcgtattccgtcttcaacgttgaccagatcgacggtctgccggaccactaccaccatcgtccgacaccggtcctcgatccgattgagcggatcgagattgccgaccgcttcttccgtaacaccggcgcagtcatccggcatggcggatcgcaggcctattattcgccggtaaccgaccacatccagatgccgccgttcgaaaccttccgcgacgcggcttcctacgcggcgacgaagagccatgaggtgacccactggacggcaaatccgcgacgagtcggccgcgatctcagccgatattcgaaagataagagcgaacgcgcccgcgaggaactggtcgcagagctcggcagttgctttctgtgcgccgaccttgggatcgccccggagctggagccaagaccggatcacgcctcgtaccttcagtcctggctcaccgtcctttcaaatgataagcgggcaatcttccaggcggcggcgcatgcgcagcgcgcggtcagctatcttcacggcctgcaggggtccgaggagggtagcagcaaggcggcggcatagggcagctttggatcagggacggtcgtcaacgccgacggccgtctttttgattggctctcgttcggtctgcggatgctggttcagtgtgaggtccaacttgccccagatcgatgccttcttggcatcggacttgggtttgcgggaagggttcctctcgacgacgaacggctttgtctgctgacgcataaatcctcctgggcgacgaatcgcgcctgaacgatatcgcgcgcgccaccgaacgcaacagactgtcattcaacgtttcataccgacggtttcgacggcatgacgtccaacgccattggcgacgaagggaatttacatcctcccccgcctgttcaggttgtttgcaaggagcacagttcgccacatgggttgttgcggaatgctgcatcgcacaaatataggtgggcttgcgaatataccgactggggagggacaggccgtggaaaaatacgtgggcgcgaagctgcatggcattcgagtgaccgacgcaaagctgaactaccacggctcgatcacgatcgatgcggacttctgccgggaggtcggcctgaaaccgctggaatatgtggagatttggaacaagatgtccggagcgaggatcagcacatatgtgctctacggcgatcccggctccaagtgctgcattctcaacggtgcggccgcccgcacgtgccagcaaggcgatgagattatcatcgcgtccagcgtcttttgcgaaatcgatgacatcatcaagctcaagccacgcgtgctggtcttcggagaaaacaacgaaatagtcgacaggatcacctacgaggtctttcgccgtgcagacaattctctcgatatggccgtgatctccgagcttcccgacaacagctacggatttccggcctccatttctgcgtagcactaatgcagtcggccggcgtccctcgacgtttgccgatatggattgccgccgtaccgctttctgccgttggccctcgacgggaaccattgccacatgcctttgcctgacgttagccgcgctccattcgcgggctcgatgaggcatgtctgaccggagagcggctccgcctcgatcgtcctcccgcaacggccgtccgaaactttcttcccctggcggcaccaccgccattcctcgcgcgacaacaaagttcctccaggccgccctccatttcatttcggccccgtgggtgcggtccgatcgtccccggtccttgcgacagccatcgaggccgcaatggcgcggcccgaaacaccaaaaggaacatgacaatggctaccatcggcaccttcacctccaccgaaagcggcttctccggctcgatccgcaccctcgctctcaacgtcaaggcccgcatcgcccgcgtcgaaaacccctccgacaaaggcccgcacttccgcatttacgccggcaacgtcgaactcggcgcagcatggcagaagcgctctgagcaaacagaccgcgactacctctcggtcaagctggacgatccgagcttccccgcgccgatctacgcgacgctggccgaagtcgaaggcgaagacggtctgcagctgatctggtcgcggcccaaccgcgactgaggtccggccgaggccccgccaccgagcggggccaattggccgcagtacacagcatttacagcaatgctgtaaatgctgtatttatatcgagacagctatggccgactcgacacggatacaacggagataaacatgacccgtaccaatggctcatattcaacgagcgatctctcccgaaaatccggagatatcatcgcggaagctctgcggcatcccgtaacgattacacagcgcaacaaaccgcgcctcgtgctcctcaacatcgatgactacgaacggctgatgcggcaatccgatgctcgtaccgtcggcacgctcgaaaccatgccgcgcgaactgttcgacgaattccaggccgcggtcgatacctatgcggagaccgacgaggttaaccgatgagcggctatgacgccatccagaccgcgacggtcatccgttatccctatctttgggcgagagaggcaggcaggggcgagactgaaggccgcaaggatcggccggtcaccgttggcgtaaggctcccacgacccgatggagatttggtggtgtttttcccgatcaccacgaagcagccggaaaaggcccgctttgcggcggaaatccccgccatcgagaaacggcgggccgggctcgatgcagatctgcggctctggatcatcctcgatgagttcaacagcgacgtcgtcggccgctctttttacctcgagcccgaaccaccactcggccggttcagcaaggccttcttccttccccttctccgggagtttatcgcgcgtcgcaaatcgtttatcgaaatcagccggtccaaatagtacacgaagggtttcccagccggattgcggggttcggccggatttcgcgctcggccgacagaaaccaggtgaaggagtggtggagcgacctgccaaattcttccgatgaggccgtggcactcgaagccgtttgacggtggatcgccggcgtgatcgtgccgagtgccggccggagggccgctcggaagtctgtcggcgtttgtcgcctcgccttgttcatccgatcgctgtcacaagccagatcctccgcaggctccagctgatctgctcccgccccaaccccgatgaggtcctcggggctccggccatcgggcgggcctcccgctgtgacttttgccctccaccatccatattggatggatggaaaaatggagcccggtatgtcatatcccattcggatggaaacggatgggagaatggatgacggctcttgatcttgcgaaattacgcataacgcctgagatcctatcgctgatcgccgaattcgagggtgcgtggcgagcgcttggtcgtattgcgcccgaccggctgtccagcttgccgacctcgcgcttggtcgaacgccgggcacaatccggacagacgagtttttcctccggagctgcagcgccagaagcagcggctcgcgcgcaagatcgagcgtgaacgcatcctgcgctgcgacctgccggagtttcggtcgcgatcctcgaactggcgcatgagcacgggcctgtcacggtgatggacgcggccaaggccgcaggcgcaagccgcaacactggcaaggatcatcctcgggcgttgaccgagcaggggcatctgacccttcatggagcgggtcgtgggacctggtacggcctgacttaaaactggagtgattggtccgccgatgcgcagggatcggagctacggcccaactgtgcgcggccgccattgccgcatgcctttgcctgacgttagccgcgctccattcgcgggctcgatgaggcatgtctgaccggagagcggctccgcctcgatcgtcctcccgcaacggccgtccgaaactttcttcccctggcggcaccaccgccattcctcgcgcgacaacaaagttcctccaggccgccctccatttcatttcggccccgtgggtgcggtccgatcgtccccggtccttgcgacagccatcgaggccgcaatggcgcggcccgaaacaccaaaaggaacatgacaatggctaccatcggcaccttcacctccaccgaaagcggcttctccggctcgatccgcaccctcgctctcaacgtcaaggcccgcatcgcccgcgtcgaaaacccctccgacaaaggcccgcacttccgcatttacgccggcaacgtcgaactcggcgcagcatggcagaagcgctctgagcaaacagaccgcgactacctctcggtcaagctggacgatccgagcttccccgcgccgatctacgcgacgctggccgaagtcgaaggcgaagacggcctgcaactgatctggtcgcggcccaaccgcgactaaggtcctcgaggctccgcccatccggcggggcctccccccccgccaaaatgtgaagccggaaccaggcgtcgagcccgcttccggtttttttggtgccatatgggaacggggatagccgctcggatctcccgatggtgccgggccgggccggcagcgtcaaggacgagcggttagcccccaaatttcaggcccggtcctgcggcccgaaccagaaattcggctcccccactcgccgcctccggcggtcgctaacgcgatccctgacccggccatcccgtcccaccccgcgagctcgtctttcgcgaactcaaggagatgagaccatgacgatcgaacaacatatcgaagaactgcgggccgagtcgaacaacacatgcgacgcagccgagcgccgccagatcgagaccgaactcgaccttgccagggccgagcttgccgtgcacctggccgagcgggtcggctccatcgacaccgagccgcccttctgaggcggctcacctcgtttcaaggcgggctccgttcgacaatcttcttccccgattcaacgcttccgcttgaggaacgccgcgtcgtcgcgtctctcctttctacagagctgtcatctacgttgcgggatgttgtagccccgcgccctcttctgccgcgtcaggtcgaggaacagtctgacggcctcatcctcccgcccgaaatgatggaccatcatctgccccgatgtcccgatcctgccccagcggcgcgtcaggcagatttccccgaacagcgagacagatatctgcatcgcgtagaagcgagccatgttcttcgccgtgtcggttcgttcgatgtagagctggtaaggttgcgtgaccatgcgcacagagtcgccgatcgccgccagagcgtctaacgacagttttgaatcgttggagacctatcgattcattgcggtgatgtttcgcgagatctgaacgattatccgggcgagacggctcagccgcactgctctactcgctggcgctcccggggtccgaaaacggtctccgcgcattcgcgtgacgatcctctcgctggaaccacgcgacaattctcgtccgatcgggtctgacgtgacaggccctccaatccagaccccccaaattatctggagacgcgcgttggccaacatcgttaaaagtttaatctaattttcattctctctgaataactattacacaacgatcagattgggctgtgcgaaggtcatgcgaacaggtgcagatttcctctgccgctcagccgacttcgcttcggcttggttgcggcgaaagggacaaacacatggctgccattatcgacttccccttggagcgcagctgcagcgctcagcagcgtgcgctcatcgataatgcggagcaggaaggcgctcggtttctcaaggcagccgagactttgcttggtgtgttgcggcaagccgaacgaacgcaacaggcaattcttgcctatcaagccgagatgaagggccggagcgaaatcattcggcacacagatagtcgcggagcggatgaaattcctgcgtctggtgaagcctgccgcagtggcaacactcggcaagcgaccgatggctgaagttttccggcgggtcggggatcgccgccgtcatgaacccacgtgaggaaaaagaccgtgtttagcttcgtaaaaaagagacaatttgctttcctgctggcggcagcactcctccttggccatggtgcaagggcggaagacgtcaacttgatgaacggggtggtcgcccgtcccggcgacaaagatacggtaccagcggacaaattcaaaaaggctagcccgtggaaaatcggaatgagccatttcggcgtcagcgccaacacctgggctactcagatggccgctgagtctcaggcggccgccaagagcgatccccgcatttcgcagttcgtgctgctcgacgccaatctgagccaagccaagcagatcgccgacatcgatgatttgatcgcccagaaggtcgacgccatcatcatcacaccggtttcgccgacttccgcggacgcaggtatcgaaaaagcaattaatgccggcattcccgtcattgtccatacgggccttaccaaaaccgacaaattcacggtcgatattcagggcggtggcgagaatttcggaaaggtctcgggcgagttcctggtcaaagaactgggaggcaagggcaatatctgggtcctacgcggactgccaacccatccggaagacatcaatcggtacaagggtctcctcgaagccatcaagggtacggatatcaagatcgttgccgaggacgccgggctttggtcgtatgactacggccacaaggtttgcgagacgttctatctcgaaaaccgcaaggtcgacggcatctggtcgtcgggcgccgatatgagccgcgcctgcatggatgtcttacagcaatatggcgcgaaggttccgccgatcaccggcgaggtgaacaacggctttctccagaaatggatcgaaagcggggttgatgctatcgccaccgaatacgggccggaacaaggagccgcggctgttcgcgccgccgtcgcgctgctcgacggcaaagccattcacaaacgctatgtttatgagccggacggttggaacctcgaaaaagcaaaagcgaattaccgtcctgacctatcggagaagttctggatgccaagcagcctgaccgacaccgacctgaaggccctgtacggcaagtaggcaaatgcctgcccctgcgttaccggggctcgatgaacgtcaaaagttgatgtcatcacgaaactatacgaacaaccctaccgagcgtggcgagatcaaagcgcccactgtcgccccgaatccaaggagccgtcttcgatgacaccagcaacagcgaaatccaacgaccgacgtaatttcgggattgccggacgcttgacggcggcttttgtcggcattgcggccctcgcagccatcgccggcgcctcctcgtccttgtattcgatgaaaagctccggcatcgtcaaggagctcggcgaccgaacactcccgaccgtgaccgaatccctcgccttcgcgcaggaaagcgccatccttctcgcagaggcgcccaatctcgtctatgagccggatctcgcttcgctcgacgcaagttcgaagcgcctggaagccatcctcgccggtcagagcggccgactgacggccttgcgtgacttgggggtggcgccggagctactcgattcagtcgagaagacaagccaaagcctcgaaccaaagctcaatcagctgacagccatatcttccgaccggatcaagtcgaagttccgcatgcaggagggtgtggctcgcgctctgtcccgttacaagtccctggcgtccatgctccgcaacgcgcaggccggagcggcggacagcagcatcgagcgatcgcgtgccctgaccgacctccagatggcggccgcccagatatcgaccctgatatcggcgataccggatgcgtcagagaccgaactgcccgccgtcaaagatcaatatgatgccaccggcaaggagattgacagtatactcgcgcggctgaaagcttcaggtggcagtgccgccatgcaacagcttgtcacggctctccaggacgagggcggaggtcctgaaggcctgtttgcgcttcgatccgctcaagccaagcttaacggtcagatcgcagatatgctgaatgatctgacggtgacctccatcatcctcggagtcgacgtcaaattgatcgcggcgaaggaaaagcaagctgcccgaaacgccgcggaattgtctcgaggaatgacccagcagactgtcgcggtcaatgcggcaacgagctttctgttgattgcggccgcgcttgccgccctgttctacgtccggcgttccgtgacgcggcggctgatcaggctcgcgacggtcatgggccgtatcgcctccggtgatcattccactcaagtccccatgtccggccgtgacgagatcaccgacatggcgggcgccgtcgaagtgttccggaccaatgccgtcgccaacatccgcctcgagcaggaagccgaggaacaacgcaacctgaccgaggaggatcgtcgtcgtaaggccgagagcgatcgtgtccgcgccgaggcgatggcacaagccacctacggcctcggtgaagggttgaagcacctttctgcgggcaatctgacgttccgactttccgcgcctttcgcggatgaattcgagacgctgcgcgccgatttcaatgccgctgccggccagcttgccgagacgctgcgcgccgttgccgatgccacaaacgccatcgacagcggcagccgcgaggtcagcgtcagcgccgatgacctctccaaacggaccgagcagcaggctgcctcgctcgaagaaaccgcggcggccctcgaccagatcacggtgaatgtcaccaattcatccaagcgcgccgacgaagcccgcgcgatcgccgcccaggccaatgccagcgccgctcaatcgggtcatgtggtggcgagcgccgtcgacgccatggagaagatcgaacagtcgtcgaaccaggtctccaacatcatcggcgtcatcgacgaaatcgccttccagactaatcttcttgcactgaatgccggcgtcgaagcggcacgcgctggtgaggctggcaagggcttcgccgttgtcgcgcaggaagtgcgcgaactggcgcaacgctccgcaaaggctgccagagagatcaaggatctcatccgaaactcatcggtcgaggtgcagaacggcgtcaagctcgtcagcgaaaccggagcggccttgaaaacgattgagggctatatcgtcaccgtcaaccagcatatggacgcgatcgcgatatcggcccgcgaacagtcggttggtctttcggaggtgaacaccgccgtcaaccagatggatcaggtcacccagcaaaatgcggccatggtcgaggagagcaatgcagcaagcgcgacacttgccaacgaggccgggcggcttcgtgccttaattagccaattccagttcggcgatgcggtacgccgggcggtttccatcagtgaggtcagcccatccacccggcccatcgcatcgccggcgcgtcggattgcgagtgctgtcgccaaagccttttctggcaacgccgcggtcaagcagacctgggaagagttctgagcaacgtggggatgaagtcctccccaaggcgcacggatacaggttcaggtggtgcaagagggtgcgcaacgcgcaccctcttgcacttagattccatgaacatcaccgcggacgcggactcgctcgtcaaaatcccgtgtcagccgatccatgtcatttgccaccttcggcaaaatctcctgtagcgctactttactctctttcggtaaaccggattgggcgctccgcgcctcgctgcctgcagttccgtgctcttctgtcgagattgcgtcaagttccggagttttctcgcgattggtttttctccgatcggacaaacgaatgattgaggtctcaccaacgacagtggcttgggcgtgcgatggttcgggcgatttcaatgagtctttctgctcagcgtggctcgcttccgtgctccgctgaagttcgagcgcttcggtctgcacgatcggcttgacctcgccacgtgctgccagaacttcctggcgttttgcgatccggtcgagcgtggctgcgtaatccggcaaggccgggaatttgtcctggtagagctcgctgccggacttgcccagttggctggccaagatatccctgtcggccgtatccgcacgtgcggtgaagagttgcgtccgctcgtcggccttgctcagcaaggcgctgttggcgttgatgccatgggcggcgttgtgcaagagatagacttggtcaacacgtttgccatcgtcatgtcgggtgagttcataggcagagccgatgaccgtcgtcgggccttcgatcttgtagcccttaacgcccctatcgcccggctcgccggtgctggcctcgaaggtcttgctctgactgctgccatcgggtttgaaggtaacggatttgccgtcgacgttttcgatccggccagcttcgcccgcaacgagattcctatagctgctggtgacgctgagcctgtcgccgatcctgaaacgaatatccttgttgttgaacgccttgaaggtgacagggtcgccgctcaggcggccggatgcaaggccctgcttttcgatctccttggtcagtgcatccacatcaacgcgccggttagcatagagcatgcggaccttctcgggatcggccttgatgtctctttcgtaagcatccgccatcgctttcagggccgaccctgcatccgcgttctcgacaagggagccggttgcgaccaatgtttccacgagcttcttgtgatcaccaccctgcagggcttcgacgacagatttctgactgtcaggcgtccaatgactcgcctcgggggacgtctggtgcgccaactctatttggatagtgggtctttcctcgccacgtgccgtcagaagttcctgacgtttcgcgacccggttgagagcggctgtgtagtctggcaaggccgggaatttgtcctgatagagctcgctaccggacttgctcagttggctggccaagatttctctattagccgtgtcgctgtgcaaggtgaaaacctgcgttcgctcgtcagccttgctcaacagcgcgctcgcagcattcgagccgtagatgggattgtgcaagagatagacttggtcaacacgtttgccatcatcatgtcgggtgagttcataggcggagccgatgattgtcgtcgggccttcgatcttgtagcccttaacgcccctatcgcccggctcgccggtgctggcctcgaaggtcttgctctgactgctgccatcgggtttgaaggtaacggatttgccgtcgaccttttcgatccggccggcttcgcctgcaacgagattcctatagctgctggtgacgctgagcctgtcgccgaccctgaaacgaatatccttgttgttgaacgccttgaaggtgacagggtcgccgctcaggcggccggatgcaaggccctgcttttcgatctcttcggcaagtcggtctacatggtcacgcttgttggcatagagagcgcggaccttctcggggtctgcgctgatgtctctttcatagctctgtgctatcgctttcaacgctgaaaaaaggtttgagttctcgacaagggagccggttgtagccaatgtttccaccagcaatttgtggtcgcctgcctgcaaagcctccacgattgatttttgactattgagcgtcgcgtggtccgcgtcgagcggcgtttggggcgccagttctaccggggcggaggttttctcctcgccacgtcctgccagaacttcctggcgttttgcgatccggtcgagcgtggctgcgtaatccggcaaggccgggaatttgtcctggtagagctcgctgccggacttgcccagttggctggccaagatatccctgtcggccgtatccgcacgtgcggtgaagagttgcgtccgctcgtcggccttgctcagcaaggcgctgttggcgttgatgccatgggcggcgttgtgcaagagatagacttggtcaacacgtttgccatcgtcatgtcgggtgagttcataggcagagccgatgaccgtcgtcgggccttcgatcttgtagcccttaacgcccctatcgcccggctcgccggtgctggcctcgaaggtcttgctctgactgctgccatcgggtttgaaggtaacggatttgccgtcgaccttttcgatccggccagcttcgcccgcaacgagattcctatagctgctggtgacgctgagcctgtcgccgatcctgaaacgaatatccttgttgttgaacgccttgaaggtgacagggtcgccgctcaggcggccggatgcaaggccctgcttttcgatctccttggtcagtgcatccacatcaacgcgccggttagcatagagcatgcggaccttctcgggatcggccttgatgtctctttcgtaagcatccgccatcgctttcagggccgaccctgcatccgcgttctcgacaagggagccggttgcgaccaatgtttccacgagcttcttgtgatcaccaccctgcagggcccttgatgtctctttcgtaagcatccgccatcgctttcagggccgaccctgcatccgcgttctcgacaagggagccggttgcgaccaatgtttccacgagcttcttgtgatcaccaccctgcagggcctctacaacggatgtttgtgaaaaatgacgcccgttgcctgcagaggcggcgtcttgcacttcctggtcattcgaaggcatagttttttctcctgagtcttcggtcgatcggttttctgaaaagtttgagagggcgtccgttgatgacgattcccaatttggttcctgaacatcttgctggtgggctatggaaccaactcgggaaccggcagtactggtgtcgggatcgagccccgcataggtcggttgaattccgttcgcgagggatcctcccaagttcaatcgttcgactagggaggtgatatcttcgacagcctcggcagaactgattgagcgccgcgccatttttttgtgaggttcaatttcttccttcgtcgcgacgcgcttccttttctcgaccgcagtctccggttttgtatccgctgtgatccagggccgatgtcctcggcgggctgaggtgttagccggcaatcctggcccatagaattccggctgcatccgctcttcagtcgtgatgacggacgcctgggatgcctctaaatcaatggcgctttggtaaaggggtgcgctttccggcatatccacgtccgttgtggatggcccgtgaaactggttctctccaacggagctctcttgcgtggccagggatgaacgaggcgtcgttggaaagatttccatcctgtcggccggcctcagcaactgctcgttcgaaatcgacgagcgctcctctagggctatatgttcggacactgggaattgaatggagttattaggtacgatttgctgagtgagctttgcactgagaacttgaacgttgtttgccacgagaggagacgcaatgacgtcgagacgactgcgatgcctcgtcaagccgacataggtcagcttatctgaaagagcaccgtcacagaggaggatggcgtgatcaactgtggccccttggctcttgtgaattgtagcagcgtagccataggtaaatcctgcaaactcattatcggtccaagtgacagtgcgcgaagatccgtcaagccgtgcactgatacggaccgtcgcatttgtgccaatatcacgtccggaaggttctgcgctacgcagtccgactacagttgcaaaagtaccattccgaatatcagcctgcagacggctctcactgaataagattctgtctcctaaggcgagattgatcttttgctgaacccgcctcgacgacccatcatctattccaaattcagaatctcccccatctatcaggcttgaccacacgctcatttgctggtcttgcaatcccgatttatcgacgaacctctgatgaagagcgatattggcgcggttaacactcctgttggagtgtgccatgacaagacgatcatccaccgggtattgatcgcaaactctattcatctcctcgagcatacggtcgatgatttggtctgatgcccttacgtttgcgccgcgagggccagcagatacgaaacggacatggcccatttgttggagcgctgtcagatagttcccgacggcgctctgggcatcgtttcgtatgtcacgtccgagcttttcagtttgtaatcgccaccccgcatcgagttgtcgaagcggctggactaggtcatagcaaccggcttgctgcataatgatcggcagcaggtcaccgggtccaaccggaggcagctgacgatcatcccccacacagatgagtttcggcctttcggttggttggtaggaatcggcacttccgatcttgtcgattagctgcgcaatctcctgcgtcttgaccattgacatttcgtcgatgacgaaaatggtattttttccgacggtccgatctttggccttaaacgtcgtggcgacatcgcgaagccctttctgacgaagctcctgagcggcacggttggtgggtacgaaggcaaccaactttatttgctcggccgggagcgtatcctcgttgaaccggtccaccgcttcgttcagggctccaagtacacttgttttagcggaacccgccacgcccaccatagtggcagcgcgattaggcctggacaggtaatgcagtgctcctctaagttccggtgtgaaaatgcctctgtcggcgaccatatcaacaatggtccctggaacgccgaagctttgttccgcggacagattgctgacatgccgtataatattctcttccgcatttctgagctcggtagaggtatagagaggttggccatcgggcgattcgagctgggtaagcatgtcgcttgcgatgacctgctgaaaaagctggtcgatttcttgtgccggtcgcttgaagcgcgtgagcgcccgggtcgtcgaaatcttgagctggtcttgtccgaagaccgcagtgcggttggcggcgtggtttacgacccattccacaatattgctctggtccagtgggttaatggactggcggagttccgcctgcgatcgcgcgggcacagatgtgtcaacagcagccattccgggatcggacattataatgtcatcgactggcatgcttgccactcctactcttctcacttttcaatccgttgagtgatcattcacccgagtatgggcatttcggtaggtgctaattcaaaacgcaacaagtatccgctgcagcctcaaagccggttggagggagcatggtgatcatcaaaacccggaagcacaggctcgctgtgtcgcgcggctttcaagtattcttgacgaaggattgaattcattgacctcagatgaacaatcttttctacgataccatccattgcgagaactataactcggcatcaggcagttctctacatatcggcacagtcaaaatcgctacaaatgaaacttaggatgtttacatttaaaggcgacgagttgcagctttctgagcggtagcgtctggatctctggttccatggaacctgttctttccgacgcaagccttcatggcttcacgccgaaaccacatggcgcggccgcatctgagcggcgcgttgccggccgtgaagacgatttgttcgtcggcgcgcatgcgcaggacttcgtgcggctggatcagcggtcgcgccgcgagctgcttcgagcgtgttcgcgacgatcccctcgcctgagaactgcggctgacctgatcgatctcgaccgtggtcatgccgcagcgtttcgatatgtagtcggcggtctccggatcgttgatcgcggcgaacgagatccagctggcactctcgaaccacttgctcgaagcgtcgcggccgccataggtctcgcgcatctggccgatcgactgatagatcatcgtcagcgtgatcccgtatttccggccggcgtcgcgcgcggtctcgagaatccgcatatagccaagccgggcgacctcatcgaggagaaacagcgcacgcccctcaagctgcccgtcgcgattgtagatcgcattgagaagcgagccgatgacgacgcgcgccagacccgaatgggtctccaatgtcttgaggtcgatgttgatgaagacgtcggtgtttcccccggctatgtcgctggtcgagaatttccgtccagacacgagcgcggcatagttcggataggaaagccagtgtgtttccttgaccgcattggcatagacgccgctgaatgtttccggcgtcatgttgacgaaggcagcaacgttttccttcacgaaatccgagcccgaattgtcgtagatgtcctgcaggcgcttgcgcaatgtcggctccggctctgagagattcatgcgcacctgccgaagagtctgctccgtctcatccgtgtgaccggacaggcagacatcggcgatgagcgccgtgagcaactgcagcgccgatgcgcgaaagaagtcatcacggacgccgcgcgcgccaccgctgtcgctcatgatccatgacgcaacggaggcgatatcctcctccttcgttccgccgaaacggccgacccagtccaggacgttaaagccgatgtccggcttcttgggatcgaggacgaacacgtctcttcccgctccgccgcggtgcgcggagaccatgggtgcgacctcgttcgatggatcgagcacgatcagcgtgctgccccatttgagtgccgtcgggatcgtcaccgacgtcgtcttgaagccgccggaaccggcaaagacgatcccgtgcgacgagccgaaggagccgttgaagcacagcagaggcgacttgccaccggcgccccaggtttccgcgttgtcggctcgaaacgcttgtgctgcgacgttgtccttgtcgacccgatagcgctcgccgatgacgatgccaccagcatcggaaaacagcgtcgccgcttccgtcagcttcatccagtctgcttcgccgtgcagcgcccgcttgccgtgaatgcgtttcggtttggcgcttgcgaacgccgcattgccgatgagtgcaacgcggagtgcgaagcaggcacataggagcgccgcactcgcgccgatcgacgtcgccgggtcgagataagccaggatcgtcttgtcggccggcagcaccttcatgaacgcgccaaggcgcgtggtttcgcggatggccgcgatcaagatggtagcggtgcatccagtgagagcgccccaacctgcctgtttgatgttgatcgaaccggcactcgcgaacaggaacagaatgccgatcgcgctactcaccacatagggcaaggcgatgcccacccgcccccatgtcagtcgtgcggccccggtctttccgaagtcggaaagccattgctcgatcccggtcattccgataacgaccaggatcatcaacgccgctggccccgcgacgagcgcaatcctactcaccgtcattgccgaaggcctccaccccgatagcggtcagcctggaccgctcgccatcgtcggcgttgatgcgtcgggcaacatcgatcaaggctcccagcagcagcgcgcgcttctggtagcgcagtccggcctttacgatcaggccaccgagctcgatcttttcccgcgtgtccttcttgcgggcgtcgaatgtcatcgtcctcgccatgcgctcaagcctcgccagtgctgcccgcaccagcgccagatgagatcggcgcggtttgttgcgtgacggcgcctggccctcccctttcctttccgttcgaagcgcccttgcctccgcgaaaccgcttggcgacttcctcgaaagccgcctgaagctccccttcctccacctcgatgtcgccgagcccggccttgagcgcgatccggccgatccgctcggcttcccttgtctctgcgatcttgagctgttcctgcagcttggcgatttcgtcgcggattttcgaggatggcttcttcatgtccgatcgtctcctgggtgagaaagcttgtctttcgaacccagtttccggaacttgagtagcgaacgcactactgtgaatcctacaatcgccaagggcgatgctttgctggatgatcccggccgttccgaaggagcggcttccaagggcgcaattatacgtcgctggcgcgacgtgttgctgagagagcctggtgaggccgccgctccgaagaaccctttgatttcgttcgcaaccgggagagaactccgccgtggccgtccctcacttctccgtcagcgtcgtcgcccgtggctccggccgcagcgccgtcctgtcggccgcttaccggcactgcgccaagatggagtttgagcgggaagcccggacgatcgactacacgcgaaagcaggggctcctgcatgaggagttcgtgatccctgccgacgcgccggaatgggtgcgcagcatgatcgccgatcgctcggtcgccggcgcatccgaggccttctggaataaggtagaggcattcgagaagcggtccgacgcccaacttgccaaggatgtcaccattgccctgccgatcgagctgacggccgagcagaacatcgcgctcatgcgcgactttgtggagcggcatatcacgtcgaaaggcatggtcgccgactgggtctatcacgatgcacctggtaatccccatgtgcatctgatgacgacattgcgcccgctgacggaagacggtttcggttcgaagaaggttgcggtgctcggcccggacggcaagccgatccgcaacgatgccggcaagatcgtctatgacctctgggccggcagcaccgaggaattcaacgcgtttcgcgacggctggtttgcctgccagaacaaacatctggcgcttgccggcctcgatattcgcatcgatggccgttccttcgaaaagcagggtatcgacctcgagccaaccattcacctcggcgtcggcgccaaagccatcgagcgcaaggccgagcaatccgaccacaagtcggagacctcgactcccaaactcgaacgcatcgagcttcaggaggagcgccgcagcgagaacgcccgccggatacagcgccgtccggagatcgtgcttgaactaatcacgcgggagaagagcgtcttcgacgaacgcgatgttgcgaaggtgttgtatcgctacatcgacgatgtcgctctgtttcaaagtttgatggtccgcattctgcaaagtccggtagcgctccggctcgaacgcgagcggatcgattttgcgacaggtattcggacaccggcgaagtacaccacgcgcgagatgatccgcctggaagccgagatggccaaccgcgcgatctggctttcgggccgcgcctcccatggcgtccgtgaggcggtgctggaggcgacctttgcgcgccatgtccgtctgtcggatgagcagcggacggcgatcgaacatgtggcggacggtgaacggatcgccgccatcatcggccgcgccggcgccggcaagacgacgatgatgaaggctgcgcgcgaggcgtgggaagcggccggctatcgtgtcgtcggcggcgccttggcgggcaaggccgccgagggcctggagaaggaagcgggcatccaatcgcgcacgctgtcgtcgtgggagcttcgctggaatcagggtcgcaaccagctcgacgacaagaccatcatcgtgctcgacgaggccggcatggtgtcgtcgcggcagatggcgctgctcgtcgaaaccgtgaccagggccggcgctaaactcgtccttgtcggagatccggaacagcttcagccgatcgaggcgggtgccgccttccgcgcgattgctgaccggatcggctatgccgaactcgagacgatctatcgtcagcgccagcaatggatgcgcgacgcctcgctcgatcttgctcgcggcaatgtccgcaaggctgtcgatgcctacaccgcccatggccgaatgattggtttgagactgaaggacgaggcggtcgaaagcctgatcgcggcttgggaccgcgactacgacccttcgaagaccagcctgattctcgcacaccttcgacgcgacgttcggatgttgaacgagatggcgcgcgccaagctggtcgagcgcggcatcgtcgcaaatggatttgcgttcaagacagaggacggaacccgcatgttcgcggccggcgaccagatcgtgttcctcaagaacgagggcagccttggcgtcaagaacggcatgcttgcaaaggtgcttgaagccgctctcggccggatcgttgcggagattggcgaaggagagcaccgccgcaaggtcacgattgagcagcgcttctacaacaatctcgatcacggctatgcgacgacgatccacaagagccagggcgcgaccgtcgaccgagtgaaggtgctcgcttccctctcgttggaccggcatctgacctatgtggcgatgacccgccatcgtgaggatctcgccgtctactacggcagtcgctccttcgcgaaatccggcgacctcgtcccgatcctgtcgcgccgaaacgccaaggagacgaccctcgactacgagaaggcgtcgttctacggccaagcgctgcgcttcgccgatacgcgaggtctgcacctcatggatgtcgcccggacggtcgctcgcgatcgcctcgaatggaccatccgacagagctcgaggctggtcgatctcggcgttcgtctcgccgctattgcaacgaaacttggtttcgtcggcagcttcaaaaactccccaatccagaatccgatcaaggaggccaagcccatggtatcaggcatcaccaccttcccgaaatcgctcgagcaggctgtcgaggacaagctcgccgccgatcccggcctcaagaaacaatgggaggacgtctcgacccgcttccacctcgtctacgcgcagccggaagccgcattcaaagcgatcaatgtcgataccatgttgaaggaccagtcggtcgcgcagtccaccctggcaaggattgccggcgagccagagagctttggcgcgctgaagggcaagaccggtgttctcgccagccgtgccgataggcaggaccgggaaaaagccatcgccaatgtgccggcgctcgcccgaaatcttgaacgctaccttcgtgagcgggccgaggccgaattcaaacacgaaacggaggagcgcgcggtccggctcaaggtttcggtcgacatcccggcgctctccccatctgccaagcaaacgctcgaacgcgtgcgcgatgcgatcgatcggaacgatcttccggctggcctcgaatatgcccttgccgacaaaatggtgaaagcagaactcgaaggtttcgccaaggcggtttccgaacgtttcggggaacggaccttcctgcctctggctgcgaaagacactgatggcaagactttcgagaccgccacggcaggaatgacggccggccagaaggcggaggtccagtctgcgtggaactccatgcggacggtccagcaactggctgctcatgaacgaacgaccgaagcgctcaagcaggctgagacgctgcgacaaaccaagagccaagggctctcgctgaaatgaccggggccgtaacccgccggtcgatgaccacgcagcaacgacgagccattgtggttctgtcgatggcggctgtggccgccatcctgctggtggtgactgccgttgccggcggctaccgcatcaatctgacaccgagcgagccactcggcctgtggcgcattatcccgcttcatcgaccggcagcagtcggcgaccttctgttcatctgcccgccggaaacggcggcaatgcgggcagcgagggctcgcggctatctccgttctggttcctgcccgggcggcgtcgcaccgttgatcaagacagtgatcgccgtcgcaggacaacacgtcgaaatcggcgccagcgtaaacgtggaaggtcgggaagttccctcttccagtcttgcccaacgagatggaaagggacggccgttggcgccgtttatgagcggcaccataccgcctggatatgtctttctgcattccgcgttccccggctcctacgattcccgatacttcggtccggtgcctgcttcgggcattctcggtttggcgcaggaggtcctcacctatgcgccgtgattaccttcggccggcgctgctgatattcgcttcgatcgcgatcggcgtagtgggctggagcggccatctcttgcttctacccgtcgcgctggggtttccggttctgtggtcgatctcgcgaacgagattagtggcggcacttgtctccgccggatatttcctggccgcatcacgtggtttgccgcaaggcgtagcggcgttctattcgtcggacatctggccgggccttctgctctggctgtgcgcgtctttgagcttcgttgccgtgcatacggtcgtctggacgaagaacagcggagttcgtccgtttcgctatcttctggcggctatcatcatgtcgatcccgccgttcggcatcacgggctgggcgcatcctgtcaccgccgcgggtgttttgtttccgggattaggatggtggggccttggctttatgacagctggccttgcgggcctcgtaacccgcatttggccagccgtcgccatcaccttcgcaggcctttggctgtggtccgccgcatcgtggaccgagccggatctacccaatggctggcgtggtgtcgacctcaaattgggcgcttcgctcggtcgggatgccagtcttcaccgccagcgtgacctgatcgcaacggtgcggaatgcggccagcgatggcgcacgctttgtggtgttgccggaaactgcgctcggtttctggacgccgaccgtggcgcggctttggacgagcgcgtccggcgataccgatgggacggtcatcgccggcgcaacggtgctcgatgccaccggctacgacaatgtcctcgtcgcgatcgacaggaagggcggccgcatcctttatcgcgaacgtatgccggttcccggttcgatgtggcaaccttggcggtcctggttcggggaaagtgggggcgcaagggcggatttttttgcgaatccggtcgtcccgatcggtgccagccgggcagcgccgctgatctgctacgagcaactgatcgtttggccggtcctccagtccatgctccacgatccggattttgtcgttgccgtgggaaacggctggtggaccgaagggacgtcgatcgtcgccattcagcgcgccgctgcctccgcatgggcaaagctcttcgcaaaaccgctcgtcatcgccttcaccacctgactgcctaggagacaccatgctcgacgccgccctgataaaagaatgcgcagacccctccctcaagcccgcgatcgtcgagcagttcgtgatggcggcgggctcggatgatcccctctccgttaccgtcaaatcgggcggccgattgatactcgttccgaaagccgcgtcggctgaggaggcgatggcgatcgtgcggcaatatgctggtcaggccgtcgtccgcgtcggcctgacgcagtttcccgctggggttggagtcaaggaagcgactgatttgaaggccgatttggtcgacccgtgccaaaatcttcgcaaaggcacgacgatgttcgccaaggtcctcaggatcgttgcgaaatggtatggcaacccgacgagcaaagatgtctttccgcagatttttgaggatgcggtctacgcatggaagaccggtgagttcgagggcgtaagcgtgtttcaggcggaggacccaggaccaccggttggcgtttcgcagcaaagtagagagaagatccccgccgaggaggaggacgttgacgcgaaagcaagagaggaacagccaggggcggagcaggatgctgggcgcgcggggatacggatcgatctgtcgcgcattggtggtcagcaatagcgttgagttcaaggcggaatcttagtttgagcccaaggcataaaattagtgagactcaaacgcattaaactagtgtgagtcaaaagcgcgaaactagtgtgactcaaatgcaggatattagtgtttgtcaaaagcgtcaaattagtgcaacaacaatgcacggaagtagtggtcgactactcacacaccgtcgccggaggccaacatggcgaaacccaacgaactgctcgcggcatccctggctgaactgaggggagtgacgcagaacggcacccgatcggtggtgaaatccgaagagctcagccgtgtccaccgggaacgactacaggacaatgggttcctcgaagaaatcatgaagggctggctggcggtgaactcgcgaccgtcggccaacaacaggatcgatgcggcctggagtaccgtctactgggagttcgttgccagatacctggacgaccgtttcgcgggtgaatggcggctctccgcagaggcatccgtggctctatggtccgaaaaccattcaatcccggggcaggtcatcgtcagaagcccgaaggcgaacaaccagctcgtgaaactaccgagcaatacgtcgctctatctgctgcgctcaaaggaaaacgagccggccgagacgagagaacgattgagattgatgccgatggaggaggcgatttgcaatctctcgccggagtcgtggagaacgttagcgaccgatgtcatcgcggtcattggctcgatccgtggaacaagcacgctgctgcaatatcttctggacggcggccggagccacgttggcggtcgcattgcaggagccctgcgccatcttggccgcacaaaggacgcggacacgatcatcaagaccctggaatcggccggctacaacccgcacgaggacaatcctttcgacccggcagtcgatctggtcacgctggatgcgagacgaactcaggtgccgtccgctacccggatcaagagcctctgggcgaaaatggggaaagacgccctcaatcacatcggattcgagcaagtgcgtatcaacgaccgggacggatatatctcggacattgatgagcgctatgtggccgacgccctgaactcactttcgatcgagggttacgaggtgtcggaagagctgatccggagggtacaggacggtcaatggaaaccggacgaggacgcgcaggactacgagaccaagaacgcactcgccgccaagggatacagattggcctttgaggaggtgcgagatgacatcaggaagatccttgacggagcatctaccggcgaactgctcgaggcacggcaccaggattggttccgagccatgttcagcccttcggtaaccgcgggtatcatcaaggcacaccaactcgcgggttaccgatcacacaatgtgtatctgcggggatcctcgcatgtccccttaccgccgcatgcaatcgccgacgccatggacgcactgttcgagagcatttcggaggaatccgatgcgcgtgtgaaggcgatccttgccccgttcctgttcacctatatccatccatttccggacggaaacgggcgaacggcgcgctttatcatgaacgcgcttcttgccgagtgcggagcgccgtggacggttgttcccgtcgcgcgccgtgacgagtacatgaacgccttggaagaggcgagcgggcacgaaaacatcgcgccgctgacgagatttgtgtcggagcttgtcaacgcaccgccgccttccacagaagccgatgccagccacaaaaacgcccagagaaaaagggcataggtggccgcttcttgccgtgtctcttagaacggggtgacacccgagctaagagccgatgcgcacgtcgtttgatcttgtcacaagctccgcaggttcgacactcagcgcgtgcgcgatctggccgaggactgtcaccgtggcggacatttcggcgcgctcgattgcccctatgtgccgaacgctcaagcccgttcggtgcgcgagttcctcttgcgtcaattttttgacatgacgtattcgacgcagattgatcgccatgacctctttgagatccatggcgcgagcggagcctgaaacggaactattgttccaggaactatagttccgattcgacgtttctcgtgctattgctcgtcctgtctgtcgccaggaccactaagacggccaaaggaactatgagagacacatcaggcattatagcctagacgattgttgcgcagagcgatttcgtcttgagcgtggggttttcgaaaaaagggaggagaatgggtgagcgacgtgaactcgtctgagaccaacgacgaaacaaaaaaacgccgatcctgttttggttctatggagaagtcagaactggaggctctggcgatcgctgcgatcagagagcaccgccggcttattgttgccgacgaggttgtctacgaagagtggacccgctcgtcatccgatcctgcggtctcgagcgccgtactcgagaccttgcagcgagaatatatcgcgcgccaagagaagtccgcagcccagcaggaggagctctcggaaatcatcgatgcgctcggctatgtccccgacgttgctccagatgccgacgattgacgctatagcaggccgtggtccttggcgatcgcgacgaggtggggaacggtcgccgcttcaagtttctctcgcgccttatccaggtaatgctgcactgtccttggattgattcccgtcaggatcgcggtttcaggcgcggttttccctttcgccgcccactttagacacattgcctctctcggggaaagcaaccgcttcggcggaacaattgtggtcgcagcaagcatcttcagacggtaatggatcgccagaacggcgcggaccgctttttgaccatcctgaagctttgaaacatcagccgccggggctgaagatgcaaacgtcaacatcattgttgagccgaaactgccttcgactggtatagtcaccccactgcgaatgccgtgattgatcgcctggtcgcgaaactgcctgagttcggattttccacgagaaggccactcgtctgctgtccatggaaagatctccatgcgagtcttcgcttcccaaaccaccgggtcgatgcgggaatagtggctttcaagataaacgccctgccattcttccggataagagttgaatgtgcggatttccgatccctcagtctgcagatacgcaaaacgctcgaagccacatgcgtgcgcaaatgtcttcagagcgcttttgatcatacgttcatcgtgcgcggcttctgtcatatcgatgagagagcgaaggtcaccgtccactgacttttctcctactgcgcagctgcgagcctcccactcgccgcgcctgctggcgccgcgagttacaggtgccaccgttcggccagccggagccacacgggacatcgaaccttggctgcgaattctctgtcctcattcgtttccgatgaaaacacagttgcctcgtacgcgaagcatatccacggtcgttgcaactgataggtctactcacctctaccgagtattcaagtcctcacgatctaaaatatgattatttgaggaaagatttcaccgaggaatagctctgtcgccacgcggtaaaatagggcaatcccaaggttccgcgcggcttagcgaccgccataggtcgacgggaaaataatgtcctgatcgaccagaacattgaacttgtagcccggccggattcgaattgtcggttgaacgttcagattcttcgagatcgtctcttccgctacccggccgaatgactcggcaaaattccgccgtgctgcatccgaagccgtgtcctgtgtcgcgagcgtcgaactctcaggcatcgacatgtcgatacccgtcccgatgattgccaccagggctgcagaaccgaatgtcctccagagatggcggtcgaccttgtcctggaagcccccatatccttcagcgtccgtacccgccataccaccgatctgcagggtagacccattcggaaaaatgaggtccgtccagacgacgagtacccgttcctggccaaatgagaccttggaatcgtagcgaccgaacagctttgcgccctgcgggatgagaaggcgatagccggttgcgctgtcgtagacattctggctgacctgagcggtaatgcgccctggcaggtcggaattgaggccggtgatcaatgtcgccgggatgaccgaaccgcgcttcaattcattgggtgacatctgtggcacgacctggttcggcaggtaaccgagatccttgatgtcctgattgaaaaaatcctctttcgacgtctggccgttctgatcgacgttctgtcccatcaggccggatttcatggctgcggcgtaaaggtctgacgcgctgtttgccacggcatttgtcggctggcggcccgtgtcattggtggagtttgcggccttctcgacgtcggagatgtcaaccttgagcggtgaatcaagagctgtggaacgagcctggagacgcgccatccgttgccgttgcgcctcacgcatatattgctcatcctgctcccgtttcaggcgcgccttccactcttcttctgactcgagcctttgtcgacggtcttgttgctcctccgggcggcgctcgacgataggctcgtgcttttcctctttctccatgacgacgggtgtcggctgaaacacctcctgcttttctgggtcaccgataatgccatccgtgacaccccgcttcagctggtcgccgaaactggtcgcggggctgttggaagcaccctcgatgtcgccacgattgaaggaaagcccgcgtagcgacagaccaatcacaacgacgccgacgaacagtacgatgacgatgatggcgacgatgatcggcaggcggttaagccggcgcatgccctgctgatcgtcggcttggctcgacgtgcctagctggagcgactggaccattttaatctccgtcagttgcgctgcatgatcgaaaggggactggccggcacagcacccgccgctgtcggcgtgtaagcgcggccaagagcgatggaaggcgtcgagacccggaccagcacctgtccgtcgaagccctcgattgcataggcaagctcgaccggcttgacgtctttggcgactttgccgtcggtgacgaccgtgtagccccaccccttcagggcgccttcgagggcggtcgcgaactccgacgtgtccttctccattttgatcgtggtcgtagcaccggccgggccgatctgttcagccagacgacttgccatgtcgccggcgatggcgcttgcagccggtccggtgacggccacaggcgtggaactggtgttcagtgcgtcgtccgccgtttggcaaccggagagcagcgcgaccacgaagaaatatgcgaggagcctcagcatggttcagcctccgcgccggatggtgatcttctgctgccgccaaccgactccggaaaggaggatcgctttgtcgatcgcataatcgacggtcatcatgtcgttcttcatgcgataattgacgatgcggttttgaccgccggagacgacgaagagcaccggcgcgtcctgtccggagatcgatttcgggaactggatgtaggtcttcaccccgtccgaatagacccgcttcggtttccaagaagcaccgccgctgattgagtaggaaaagttcagtttgtccggcgcggtgcccggaatgccgcccgtttcgagacgggcgttgatgtcggcgagcttggtcgacacgtcttccggatattcgaaaccaatgcgcgccatgtactggctcggatgggacttgagctggatatgataggtgcgccgtgatgtggtcacgaccattgaggtaacgagcccaggttcggagggtttgacgatcaggtggatggcctgcccgcctgtcgctcccgacgtcgcaggttctaccttccagcgcacggtgtcgccgacgaggacgtctcggacgatctcgccaccctgaagttcgatgtcgcagacttgtagaggagagcagacgacggacggctgggtctcgccgaacagaaagatgacctttccgtccggaccagtcgtcaccagtcccggcgtgccgcgccactttctggaaagatttgtgccttttacctcgttgctcgtcatgctttgcgcctgcgcgcccgccgtagccaagagtcctgccatgcagccggcggctgcgatcattctcttttttttcattgaaagaatccctgcccttaaagctgtgccgtccagtcaaaatcccggacgtagaggccgatcggattgaggcggatcgtcgcctcatcctgtggcgcggtgagcgtcaccgttgcgatcccgcggaaacggcgcgtgccggtttccttgcccttgcggtcccgctcgtattccgtccagtcgatctgataggtctggttcgacagcgccacgatgttgttgacctcgatggcaaccgtggaagacttcgccttctcgaatggagaattgcctcgaaaccaggcgttgaccttctccgtcgacggatcggacgtgcgaagaagggcgtaggtgcggtcgatatattgcttctgcaccaccgcatccggcgtgatcgagcgaaagctcgtgacgaagttgccgagtgtggcccgcaccacgcggacatcggcatactcgatctgctcggggaaacctgccgtgaccgcggttccgagcttgtcgacctcaacgatgtaaggcacgagcctcacctgcgtgctcagatacatcgcgtagctgaagccgatgacggccatgaccagacctaggacaccaacaatgcgccatgcggcggcggccttcacataggagccgtagcgttcgctccactcctggcgggcggcaagatacgggttttccggggcgcggttcgctgccatttattcttcccttgtctcgattacggtttgtcgttgcgttcgggagcaggcttcggtccgctgtgaccaccccgctgctcatcaagtttggcgttcgctagcccaaggatcgaccccgcataggcgccgggagagccgattgccttttccttcgcggcggatccggctgcttgcgcgccggaattgaagctcgcgcccacgccgcgaagagcggctcctgcaactgatgaaccgccagctcgtgcggcttgcgcggctgcaaaccccgcgccggcggcgccggcggcgaggaagccagcaccggcggcaaaagacgccgcttgcccgccgtgccggattgcctccatgccaccggagaccgatgcgccctggacgacgccctggatgatgttcgggacgtacatggcgatgatgaagacgacgactgagataccggcgatggccaaggtggtgacgaactgatccgacgaggcagtcggagcttgggcaaggccaagcaggacgttcgatccgatcttggcgatcatcaccaaggccatgagcttcatgccgacgccgaaggcatagacgaggtatcgaacagcgaagtctttcgtgaaggacgaaccacccagcccgagcatgatcatgccggcgagcaagccgacatacatttcgaccataaccgacacgaaaatagctgcgaccagggagaaggagatgacaacgatgcccatggcgagaacggcggcaatcgcaagcgcattgtcttcgaacaccccgaactgtgcttgctccgacatctgcgaggcgacgcggatgccggcatcgaacacttcagcgggcgaagctgaaccaccgccggcgccaatctggaaaagactgtccaccaccgctcgcgcaaaggtcggaccttgggtcagaacgaatgcgaagaacccgatgaacatgatccgccgcaccagttcggcgaaccagctgtccaatgtggctgactggatcgccaaccagacggccgcaatgccgatctcgatcgttgcgagaatccagaatagagatttcgccgcctccatgatggtggtctcccaccccttcgcagcggaggagacctggttttccagttccgtgaggacctgcccctcctgcgcgaatgcgggaacagcataggcgaggaaaaagagacctgtaatcaggagcgaacgcgcaacacttaccttcaccatctcgggcgcatctcctggccttccttgatcggcggcaactccttgtcggagccgaagaatttttcccggacggcgcgctgctccccggtgaacgcaggtattcctatgtttcgggaattgacgatcagcactgtcgctgcagacgatgcagcggcgacagccaacagcaagccaatcaggacgcggcggctcaccatcgcggctccattttctggccttccggaacgctcttgacctcggcgttgaagaacttttcccgccgcgcctgcgccaggtccttgtcggtctgttccgtctgaagccaggttcccatcatcgtcatctgttgcgagacgagaccgcgaagcttctgcatttgcgagacttgctgagcggcgatctcgtggccgacctgcaaagccttcatctgcccgtccgccgtttcggacatcgatcgcagcgaggacatcgtatcttcctcgctatcgaactggtcggccgtgaggctcgcagccttcagcgagctggcgatggtgtcgcggttggtgttcgaccaagtctgataagtcgaggagaacgtcgcgttgtccggcaggttggttttgagatcggcgtagctctgaaagcgctgttgaaggacgtcgtcagcgttgcccatggaaaatgagatactctgaccctggtcgacgatactgcgcagctggttgaggtcgctttcaacctgcccccagacatggtcaggaagctgcgccgtgttttggagcatgttctcgtagatcttcagctggttctggatctgctccgcgagctggctgatctgggtcagttgattgtcgacctggatgcccgagcttttcatgaggtccacgagctgcgcgttgttggcgagctgcgtccattctgtcgcagcgccggtggctgtaccggcttgcaccgaacctgcacctccaatcgtgagagcggcggccgccaagcaggcgagccatctattcgaacctgagtagcgatgtggcatcgtgaacccctctcgtttcaagccagtggatcggccagtcgtggccatattcggatttcagtgcgcggatgcgtttgaggtcgtctttgcccgatgcgccgacaaagctcagcgcaaccggcccaagcgacatgttgaagagccgccgtccttctggcgtggcgacgtagtattcgcgcttcggcattgctgtagcgacgatctcgatctgccgctcgttgaagccaatgcgctcgtagaattcacgcgtcccagactcgcgcgcggcgccgttcggaaggcatatctttgtcgggcaggattcctttagtacgtcgataatgccggaccgctcggcatccgagatcgattgggtcgcaagaaccacagcgcaatttgccttgcgcagcaccttgagccactcgcgaatcttgtcacggaagacggggtggccgagcatcagccacgcctcgtcgagcacgatcagactgggggacccatccaagcgtttctcaatcctgcggaacaggtaggtcagcaccggcacgagattgcgttcgcccatattcatcagctgctcgatctcgaaagtctggaaggcgccgagcgtgagaccgtcctcttccgcatcgagcagctggcccattgggccatcgacggtgtagtgatgcagtgcgtccttgatctcgcgcagctgcacgccgctgacgaaatccgagagcgagcgacccgacgcactcgccatcagtctgatctgccgagagatggcgttacgatgatcgggggtgatagcgacgccctgcagaccgaccagcatctcgatccattccgtcgcccaagcccggtcggcgtcacttttgagttccgacaatgggcaaaaggccaacgccctcccctcttccgcattgtcgccgccgatctcatagtgatcgccgccggctgcgagcgtcaggggtagaagtgaactgcctttgtcaaaggtgaagatctgcgcatgttcgtaccggcgaaactgcgcggcgatcagagccagaagcgtcgacttgcctgaaccggttggaccgaagatcagcgtgtggccgacatcatcgacatgcaggttcagacggaacgcagtcgagccgctcgctacctgcatcaaaggcggggaattcggcggataaaaagggcatggcgcgacaggatttccggaccagaccgagttcagcggaatcaggtcggcgagattgctggtgttgatcagcggctcacggatgttgcaataccagttgcccggcaagctgccgagataggcgtcggtggcgttgagcgtttcgatccgcgcaccgaaaccttccgcctggatcagccgccggatcgcttcggccttctcctggagtgcttcgcgatcgccgtcgaatagcacgaccaccggtgtgtaatagccgtaggcaaccagctgcgacgaggcctgcgcgatcgcatcctcggtctcggccaccatggtcatcgcgtcctgatcgactgatcgactttgtgtctgaaatatctggtcgaagaagggcctgaccttctgctgccatttcttgcgtgtgcgttcgagcttctgtcgagcttcctcggcatcgagaaagatgaaacgtgacgaccaccgataggtgagcggcatcaggtcgagactgttcagaatgcccggccagctttcagacggcaggccgtcaatcgcgacgacgccgagaaaacggttctcgacctttggcgtcagtccgtgctcgagctcagcagtagcgatccaatcgaggtacatgggaacgtcgggaagccggatcggatggctttcgccagtgatgcagaaacgggcgaactggaggagctcgtcgtagcgagcaaccctctcccctcccctctcgagcgtctcgcgggtttccattcggcggatggaaagggtgttggcaaaatactgctcaagctctcgcaccgcgctcttgaacacaaagagcaccgtgtccgcgtaagatttcttccggctctcttcatcggaatagatatatctgctgagagaggttctcttggactcgagcggccggtaggtcaggatcagcgcatgcttgctctcgaagtgtccttgctcgcgtgcgaaatgtgagcgccgctccgcatcgattgcgcgggtcaccgggtcggggaagtggcaccgatcttctgacggataatcgaccgtcggaatgcggatcgcctcgacctggatcatccaaccgcttccaagccgcgacagaaccgcattgatctgcctcgacagttcgttgcgctccaggtcggtcgcgctctcggaatcaggccccgcgaagtaccatccggccatcaggcttccgtcctttaacagcagaacaccgttgtcgacgaggccagcataaggaacgagatcggcgaaggacgggccggcctcccggaagcgtttgagagctaccattgccgcctcctcagtaccgtcgccacggcgaagtggtcgccttgtagtaaggcttataggaaatgtgccggatatagacctgccgcatgagcgggtcggacttcgccatcatcctgagcagcccgacgatcacgatccagacagcgatgccgaagatcgccgaataagccgtaagcacgacgaagatcaggattacggctgcaaggccggtgatcagcaccagctcccggtcggcgcccatgagtaggttcgggcgcgaaagcgcgcgatggatgcggttatgccgcaggccggacagggactcagccatgatctccctcccctcctctattagagccaattgacgtgatctgctcgtcggtcaacccgaccgaagcgccggtcgcaccgaacaggccgacaatattggtggcgccgagcaggatgccggcgacaagtacgacgtacacaagtcgccgcgcgaaatcgttgagctcgccgccgaagatgagcatgccgccggcaatggccacggctgcaagcgcgatcgcacccgcgaccgggccggttatcgactcctgaatctgctgcagtggcccttcccatggaaggctgccgccggaactggcgagcgccggcgcgacagaggcaagaacgattggcgccgccacgagcgcggcggcgatgagggtatgcttacgcgacatggcgcgcctcctgttcttcggtgagctgatcggattcgatctcgtactgtccgttgatgaaccgctcgacttgaatgatgtcgcgaacaagccgcccgcgcggcgtccgctcgatcgaaatgaccagatcgacggcctctccgatcacctcgtgcatcggctgctggcttgcctcggccgtaagctgctcaagacggcgaagcgccgacatggcggtgttcgaatgaatggtcgccacgccgcccgggtggccggtgttccaggccttgagcaaggtcaaggccgcaccgtcgcggacttcgccaacgacgatccggtcgggacgcagccgcatggtgctcttcaagagccgcgccatgtcgatcgaatcgctggtatggaggagaacggcgttctcggccgcgcattggatttccgcggtatcctcaagaatgacgaggcggtcctccggcgtggatttgacgatctcgttgatgacggcgttcgcaagcgttgtcttgccagagcccgttcccccggaaatgatgatgttgagccttgcggaaatcgcgctgcgaatcgtcgacgcctggtactcgctcatgacgccggtgcgaacatagtcttcgagcggaatgagacgtgatgcccggcgccggatcgtgaaggcaggcttggcgacgacggggggcaacagtccctcgaaacggtgaccgccgatcggtagctcgccggagatgatcggctgttccgtgtccacttcggactgaagcgcatgcgccacggtcccgatcaccatctccgcggcagccgacgacatctcgccggcaggtgcaacgccgtgaccgaggcgttcgatgaacagctttccgtccggattgagcatgatctcaacgacactcgcgtcgtccagggcgacgcagagcagatcgccgagggcctcccgaagtttgcggacaagccgtgggtgagagcgaagctggttcacggatttctccttacgctgcctggctgagaggggtgagttcagagcggtaattggaaggacggagcctaaggaacgtctccgtattggcgggcagtgtgcccgccacggccatcgtcacgccgatcttcttcggctcgcccaaacgatgcagcggccatccgacgcggccaaggatgcgctcgaaccgaaggtcggtcaccgtgacaatctcggtgtacccagtcgcaatgcaccattcgatgatgcccgcgaacatggtcagcgttgcttcgtggatcgagccgtcccccctgccctccgcaagtgtcgtatcaacgcagaagcgagagctctcgaccatcgcggcatgaccattgagttgcccgtaggggagaagcgacgggaaaacgtccgccagcattgtcggaccaagtgtaggaaggagcctagcacaccctgccatttcgtcgcggttggaaattgcgaggatgtaggtcggcatcagagcgtcaaaagcatccgattctcggccatcggcaacatcgacctcccagcctagccggtcggcgaagacacgcgcgcgcagctgatgatggcattggaggagctgagcttcccgaacatttcgtggacttgagatcgccagaacccgcatggatttctccctcgtcgttggtcggcggggaaatcagcacggatctgaatcgaggggtagttgtaggatcctacaaggtagaatccgcctgagtcgcaagggtgacttcgcctatattggacgacggcgcgcagagggcgacctctttttgggttacgattgtaggattatcactaaaacaatacatgaacatattcaaatggcaatctctctaaggcattggaaataaatacaaataacagttgggtggagtttttcgacctgagggcgttaaccttctgttaacctaaaagctcttgcccaaacagcagaatcggcgctaattgccagcggcggaacttttccagtttcgcgaaaaatatcgccactggcaaggaatgggtttgagatggcgaagtctgtcctaaaagcagcgcctgtagttgtagggttgacggccttgatggagcgtcatgccgatgccctctcgagccaacttcaagcacatcatcttaaggttttcccgccgcattccgagaagggcattcgaacattcgggccatcggaggcgtccaagctgctcggcgttggcgagtcatatttacggcagaccgcgtctgagatgccagagttgaatgttagcatgagcccgggtggcaggcgaatgttctcaattgaagatatccatgtgattcggaagtatatggatcaggtcggccgcgggaaccggcgctacctgccacatcgtcgaggcggcgagcagcttcaggttatctctgtgatgaatttcaaaggtgggtcgggtaagaccaccaccgccgcgcatctggcgcagtacctcgctatgcgcggatatcgagtcttggccattgatctcgatcctcaagcgagcctttctgcactctttgggagccaaccggagacggacgttggcccgaacgaaacgctctacggcgctataaggtatgatgatgagcaggtggcaatcgaacgagtcgtccgagggacttacattcccgacctccacctgattcctggtaaccttgagctgatggagtttgaacacgatacgccacgcgcgctgatgaaccgcaaagagggcgacacgctcttttatggtcgcatcagccaagtaattgaagatatcgcggataactatgacgtcgtggtcatcgactgccctccccagcttgggtatctcacgctatccgcattgactgcggcgacgtccattcttgtcacggtccatccgcagatgctggatgtgatgtcgatgaaccagtttctggcaatgacatcgaaccttttgcgtgaaatcgagaatgctggcgccaagttcaagtttaattggatgcgctatctgataacccgtttcgaaccgagcgacggaccacagaaccaaatggtaggttatctgcggtcgatttttggcgaaaatgtcctcaattttccgatgcttaaaaccaccgcggtttcggacgctggcctgacaaaccagactctattcgaagtggagcgtggcctgttcacgcgctcgacctatgatcgagccttggaggcgatgaacgccgtcaacgacgagatcgaaacactgatcaaaaaagcatggggtaggcccacatgagccggaagcacatccttggcgtctcaactgacgcccctgagacgtcgcccgccgacaataggacggcaaagaaccgctccatgccgctcctcggcgtaacaaggaaggagcgcgatccggcaacgaagctcacagcgaacattggtaacgcactgcgagagcaaaacgatcgtcttagccgtgccgaagagatcgagcggcgtctcgctgaaggtcaggcagtgatagagttggatgcctcgtcaatagaaccgtctttcgtgcaggatcgtatgcgaggggacattgacgggctccttacttcgatccgggaacaaggacagcaagtcccaatccttgtgcgaccgcatccgagccagccgggccgatatcaggttgccttcggccaccgccggctacgcgccgtttcagaactcggacttccggtcagagcggtcgttcgcgaactgacggacgagcaagtggtcgtagcacagggtcaggaaaacaatgagcgcgaagatcttaccttcatcgaaaaggcgcgcttcgcacatcgcctgaacaggcagttttctcgagagattgtcatcgccgcgatgtcgatcgacaagagcaatttgtccaagatgcttctgctcgtcgacgccctcccctctgaactgaccgatgctattggtgccgctcctggtgttggacggccgagttggcaacaacttgccgagctgattgagaaagtttcttcaccggccgacgtggctaaatatgctatgtcggaggaagttcaagcgctgccatcggcagaacgattcaaggcggtgatcgctagtctgaagcccagtcgggttgcgcgtggacttcccgaggtcatggccaccccagacggcaccagaattgcacaggtgacgcagagcaaggccaaactggaaatcacgattgacaggaaggcgacgcccgattttgcgaccttcgtgctcgatcatgtgccagcgctgtatcaagcgtaccacgctgagaaccaacggaaacggggagagtaaaccgcaaaagaaaagagccccctcaacgtcgccgtcgcggaagcccttctgtctctctagcgcgaacagaatcgcatttcctcgaatcctcgtcaagagtttttagcgccgttttggtgagctgatttcctttgcctgctgaaaggtgaaagatgatgcagacaggaagtgtaacgacgccattcgggcggcggccaatgacgcttgcgcttgtgcggcgccagacggcgctggccgatatcaaacaaggcaagacagcggacaagtggaaggtctttagagacgcgtccgcggccatggaactacttggaatccagtccaacagtcttgccgtccttgatgcgctattgagctttcacccggaaacggagttgcgtcaggaggcacagctgatcgtcttcccgtcgaatgctcagcttgcccttcgggcgcatgggatggctggcgcgactttgcgtaggcacatcgccatgctcgtggagtcaggcttgatcgtccggaaggatagcgccaacggaaagcgttacgctcgtaaggatggcgctggtcagatcgagcgcgcgtttggcttcgatttgtctccgcttctcgcgcggtccgaagagctagcgatgatggcacagcaggtgatggccgatcgagcagcattcaggatggccaaagaaagtctgacgatttgccgacgggacgttcggaagctaattacggcagctatggaagagggagcggagggcgactggcaagctgtcgaggaagtctatgtggaacttgtgggtagaattccacgcgccccgacgcttgctgatgtagagtcaattctcgaagagatgtggatgctccaggaagagataatcaaccggttggaaattagagacaattcagaaaataatagcaccaatgctgcccagagcgagcagcacatacagaattcaaaacccgaatccgttaatgaacttgaacctcgctctgaaaaggagcagggcgctaagccgagtgaaatagaccgggcaaggagcgagccgataaaagcgttccccctcgggatgatcctgaaagcatgcccgaccattggcaattatgggccgagcggtgcggttgctagctggcgtgacctcatgtcggctgcggtggtggttcggtctatgctgggggtcagcccgtcggcttaccaagacgcgtgtgaggcaatgggaccggagaatgcggcagcagcgatggcgtgcattttggagcgagcgaacttcatcaattcgcccgggggctatctccgagatctgacacggcggagcgagctcgggaagttttcacttggcccgatgataatggcgctcttgaaggctagcgggcaggggacgttgcggtttggctagaattagcgagtatggagcaggatggtctgtggtcagctgaccacagacctaataggttgaaaacatgagcgttttttggatgatcgacagaccatccgattcccggagtaccaagcgtgctctgatgggagcgataacattactcaacaagcacgaaggccccatgccgatcgttgatcgtgaaggagagcctgctctacatgcggcggtattttgccggccgaggcatgtagtcgcggagcactgcctatttactgccctaggcacaaacgttgactcttggatcgagctggcagacaaagcaataacccacacagaggacgattaatggctgacgaagagatccagaatccgccggacggtactgctgctgccgaagttgagccggctgctcctagaggtagaagagcaaagaaagcaccagccgaaacagcccgcacgggatcgttcaaatccgtgaagccgaaaacccgcggcctcagcaaccgagaaaaactggagaagatcggtcaaatcgaagctcaggtcgctggcggcgcaaccttgaaggacgccgttaagatcgtgggtatttccgttcagacctattatcaatggaagagagctgcggttcaacctgtctcacagaatccggccgtgtctgtttcagttgacgatgaactcggcgagttcatccaactcgaggaggaaaatcggcggctcagaaagcttctctctgaaaaattgcgcgcagaaaacgcggacttacgcaaaagacttggaatcaactagcggcctttgggggtccctcgctaaatcaacttgacgcgcatctctcaatgaatgaatgccttggaaaatttccgcgcattctgatcgttgcgctatcaagcaatcccaatcttctggcatatgaaaaaaccacgacccaaattcgtcgtcgaatataagacgaacaggcgacaagccaaggcccgaccaacgtcaatctggggcaatctgggtttgcaggcggtgggccgtgcggtcgcggccgacggagtcgtgccgaagagtagtctgccgcaagtccgttccgtcctggagaaggttgtcgctgcagatccagacgtggctgccatctttgctcaggttgagattaagggccttccggctccccccaatacatcatcaccgaacgagggtcacatcgagccggtagttattgagggcaaggtgtttgccgcgcctttcgtgcaggaggagcgcaccttggccccgccgcaggctccgagatctcgagcgaaaccgcggacaaaaaggcggtccccggacaccacagaacgtcctgcagtccaaggttaccgtcgtggtccctcggtgctgccaggttttgaggaagagcttgccgctatcgaggcggaaaaccgtcgtctgaagcgcctcttgatcgtgaagctccgtgaggagaacgacaggcttaagttcgcgcttcgacgatttgggggcgcctgagcacgatgctggcccacttgcttcagcgggcaaacaacatggagtggagatctaatgatcgcggcgcttgaacatcgctaggggtcttcggcgccgctgaaccgtgctccattttgcactcggagacacagcctcccaaaaacctggcgccgctcgttggtgaactcctcaacatcgagcggatcaagggaaactggaatgacatccttcgacccgtcacggcgatccgctctggccaggtccaacctacggccatgcccgcaaagccaacggcatttccacgtcaagcacattgacccactcggctgacggtacatcagctggcgagctcatccggacccagacgaactgcgttgatctcaggccgttgcggcagaaaacctccatcctcgcagccgatccaacactttcctgtggtaatgcctatttcagatgaaacagccttttttaaacttggcgcgtcattctgatattatggccacacctctacgatctagggagtgcgagaagtggaaagaaatgaagaacccgatttgcacacacatacctcgatgcggaataaaaatgcatcatcgcttggtgaggccctggatgacgatgcgatcgccaacatcgcgcatcacattgttacagacgacccggtggaaacgtcaaaaaacttcacaaaacttaagctgattaacaaatcagtgaaacagggtttcgaacgcagtgcgtacggaaaattccatcgacgcattagccggcttggtattgctagtaaggcgctatatgacaacgctgtgccgaaggaaggattcgtagaacatcctgaatatgctccagctctgcaaagggattatgcgttggcaggagagcgaattgaggcggttggtggaactttcaggttgcaaacacctcagcggaaatcggctcttgtagatcatatcttgagtatgcccgaaggtttcgatcaagctcatgcccttgagtctatagcccctcatgttggcgatctaagcgcggaagatcgccatcgtgttgtgaacaaaatgctcgagcactttgccaccccgtttcaagaaggggggctgccaaccgacgaaaatttttgtggaacgtacgctttgtccaaggcgtttcctcatatggaagacagcctaaaagcaaagatgctggatgtggtgttagagcatcctcacttagccaacctccattggacgcagagagaactagttgaagggtggcatcaagaccgtgaagctgagaagtcagcctggcgttccaatcaaaagccaattgtcgaggggcgacttgcagacctcgaacgatcgatccacagtgatatcgaggtgacaaacaggagtgattttgcgaggatgcgttcagccaggcccttgcaacaagctataagcgatacgttcgatcttgcgcgtgaggagctcaaaagccgccctcgtgaagggcggggtcgataattacatctattggtctttctgccgaacctctatgaaatccgcacgtcaaatgtggcttttacttcccgatttcaattgaagcgctaagctgaaaatcccgtccccatttctgacctaacggtttcatcaccggggcagggagcggcgcttaaaacggtgacggccaccaccaaaggacatgttcgctcacgcggtgcctccgtgcttctttgcaagagcctgcttcaggctgatgatctccttcagtgcgttggtgtgaatccgctccaggcgtttcagttcgctctccaaataggcgttgcgcttatccagcctcgtccgatcttcttccaagctctccattttcactagcgcgttatggtaattcaaccgtaactcctcaaaaaaagcacgttcggcgacgaaatgggtttcggaatcgagttcaggtatgtcgccgacatgcacgacgcgaaccgccttgccggcagcggcgagccgggcgcggtaagcgcgttgaatttccgcttgggtcagcgcgtttggcttgcggggccgcgaggaaatttgggagtaaccataacggttatttatcataacgcgttatcactggatagcatcggcgcaggcggatggcgcgcttcgccgggtcgaaatcaatatttccagatcgagatggattgaagacctgaagggccctcagagcccagacgccttggttaggttggtgcggaaccgatcccgccgccgctggtatttgcgcgtcatctcggccgaggcgtggcctagttgtttctgaacgtaacgctcctcaatgtcggccgaggaggcaagaccggcgcgcagcgagtgccctgagaacagcagcgcccgttccccttctggaagatcggaacggacgccggcggcgagtgcggtctgcttgaccaggcgggcgacatgcttgtcggagagccgctcgacgtccacggtcttgttgtccttgaagatgcgccggaacaggggaccgcgcgcgatcctgccgaagcggatccagctctcgagggcgaccaccgggcaggtctggtcggaggcgccgcggccgacctcgacctcgcgccatccagtcttgccgcgtagcgtcagcaggacgccgtggtcgggaaaaatctcgatccagccatggccatcgctgttgtcgtcgcggacgatgtcgaggccgacgatctcggagcgccgcaggccgccggcgaagcccagaagcaggatcgcccgatcgcgcagccccctgagatcatgcccgagcgtgttgaccatcaccttgatgtcgtcgccgaggacggcctccttcttccgtggcggcgttccgtgcttgcggcgaatgccggcaagcaccgtcgcaatatgccggtcggagcgatccatcgatgcgccgcgctgggtaaagttccaggcgaggccggccagacgccgctcgatcgtcgcgaccgagagggcgggggcattgcgctttgaatcgccggaggcacaggcgccgatatagaggccgatcacctggctggacggcggcagggggtcgaagccttccaggcgacaccaggcagtaaaatgccgccagtccttggcgtaggcgttgcgggtgttgtcggatctggcggcgttggcgtaggctgtcgccgtctcgacgagggcttccagccgcgccggtcgcggtgaagtgccggtttccactacgagggcgacgccggcgggaaggtcgccgtcggtagagccgtcgattttgagcgtactagccgggggattttgcatggttcgggaacctatcagaatacgtccgataaggcaacattatcggacataataccgcagagacgggcggtgcggtttatggcaaaatctgtagccacaaccgcgcgtatgacttaccatctatcgcatggattcgctcgcacctcctaccgccaacacctccacttggtcgccccgcttgccaagttggacgcggccgcgaactcaggacatgacggaatccgacgccgccttcgccgccggtatcgccatgaaatcgctcgacgatctgctcgacgctgaccctccgtggcttggctgctggcgggaccgccttgctctcaagtcggccgccgtggctgccaggatggtcggccgcaacgaggatgagaatgctattcgcgacgcggtttcgctgaccgccgcggaagatgatcccgggccggccggcaagctatttttggcgatacgattgctgatgcgccaatccgggacaatcactacgccattggttaaggagctctgcgcgctgctggggatccgctcggacaatgctcttgcctcagtcccggatctcgtcgataccgcgatacagtccgggcgcgcggcacccctcgcgctggccgatttgatatcggctatcacgaccgctcgcccggatgctgaggtgttggccgtggggctggcagacgttgtgctctcgcgaaaacttagctggccgaaaccggtaccgttgctgttacccgaacgctacggcccagcttttcggacgatcggcggcagaggccgcgtccgaccggacgagccggcttatccaaaagcgatctgcctggcgctggtcgatcgcgtggacgcggcccttcgctccgccgtcgagatcgatcgacgtgcagcacggctactgaccgtggcgccgaagcttcgcaccaagggtgcggagcccgtcatccagagattgctaaccgaagacgccgtgccggcgtcggtgcccggcagcaacttatcccgttgggcggcgaaccggctgttcgagcggctcgaaaatctcgaggcggtgcgcgaactctccggccgctccaccttccggatatttgggttgtgacgatggcgggagcgagcggggccaagaccaccggcaagcgtcaggcgaaagagcgacacgacgtgttcttcgatcgggagctggaagacctgccgcccgagttgcgctggcgggaatggatgatgcgggtcgaggcggtgatctttgcctcggccgagccggtcagccgcgagacgctggcgcgggtcgtgggaaaaaactgcagcatcgatttgctgatcgacgatctcatcgaggagttgcgcgatcggccgtacgaactggtgtcggtcgccggtggctggcagcatcgcacccggccgcggttcgccgaaacgatccgggcttcgtcggcaccgacgcggggaggggcggcggcgctgtcggagtttgaggcgatggtgctgatggcggtgggctatttccagccgattacgcgtggtgagctgtcgaaaatcttcggcaaggaggtcagccgcgacaccatcggtagtttgcgtggtgcgggtttcatcggctctgggccgcgcagcccgacgtcaggggcgccttataccgttgtgacgaccccgcatttcttgtctgcgttcggcatggagacattgcgcgaccttccgaacatcgaggcgcttgaagacgccggtctgctgagcaggcaacttgtgcaacgtggcattgacgccgcacaaaccggcggttcccaggaggacgaggactcgtcctttattgggtgaggtctgctgactccgaccgctttgccatcagcataggactgaggatcatggtagtcgacgctaatgcaatcgagagaccgagctacaccagtacagtatcggcatagtggtcttcaatgctggcaatggcgggctcgaaccgcagtgcagcggcatcgagagcatttcccacatcggaggtgtcgacctctattccgggaatgcttgtcgggatcgttcaccaagcttcaggtctgacatggtctcgtcctttcggttgacgatcgaaaagttttgcagcgcacagaacttccgttgcaacctcacgctcgccagaaatcgatcggtttcacgagaccacctctcacttcaggtcgagcgcctgtttgaggtcgttgatccgtttcgacgcatcagccttcgtcaggtcctcggcatagccgtcgcgatgatgcgcctggtccaccagcgtcttcagttaggaccattgcgcgcggtcatcgccccgtcgccgctgacccagtcttccgtgatcttcggactcggtctgcaaattgttcttgaccgcacgctagctcccttgctgattctggatagcgcggagcctttcgtcggtcgtctcttctcctccgcgggacatacctatatggcttcgtgacagaaaattgattgacaatcacagaggggacggttgacgcgaatcgcaattaagaacaaataaagaaccttggattagcgtgcgcgagcagtctgcgaacgcacactcaatctggggaccggctcgaaaagggaatgtccggcgcaagctcaatatgctacgtcgagataaccgccaatatcatggctcgatcgtttgctctaaggtaaacagatcaatgacagccacgggaataaggagattttcttgctcaagcgtactgacgaaactccatctccttcacacgacttcctcgacttcaccgccggccgaaaattcaagaccatcatggccgacccgccgtggcagttcatcaatcgcactggtaaggttgcaccggagcacaagcgactttccaggtatggaacgatggcgctccctgaaataatggcgctgcctgttgccgaagcctgcgcctcgaccgctcatttatatttatgggttccgaacgcacttctccccgagggcctcgaagtgatgagagcgtggggcttccaatacaaaagcaatctggtctggcacaagatcaggaaggacggaggctcggacggtcgtggcgttggtttctatttccgcaacgtcactgaattgatcctgttcggtgtccgtggcaagaacgcacgtactcttgatccgggccgatcacaggtgaactaccttagctcacgcaagcgcgagcattcgcgcaagccggacgagcagtatccgcttatcgaagcctgctcaccgggaccgtaccttgaaatgttcggccgcggtgttcgcaaggggtggacgacctggggtaatcaagccgatgagacttacgaaccggactggaagacatacggattcaactcagccaccgaccgtatggccgcagaataatcagtctgtagcgtcggcaattccttcagcgaccagattttcgtcctcgcgctcgatgtcttcgagttcgaggttctcgtcaaatgtgacaatggctgaaggcaggccgaccaaaacgagtgggcatggattgcccacgccgcggtgaactctgtcctcgagcttcgaccaatgggtcgtggcctgcccgtatttgtccgacacgaattgaccagcccatgcttcctcgtacgactggccgacacgcattcgtcggtcgacctcccggttctgccgggccgtgcggctcattccgaatgccgtgacggcgtcatgtgagttcaggcctcgctcggtggcgaagcgctgcaccatagccctcagttcatcctgcatagtcgttccgcgggtgatgatgaccccgactgaaatagccccatcggcatgaagacgcttaaagttttcaagatcgcgatcgaagaacggatccttgttattccattcaatctcggcagctaccacgcccgggccgaaagcttttacgtgatcaatctcgtgtgagatggcctctcgcgccacgccattgattcgcttctcgacggtgaagttcatcttagtccatccacgctgcgcaagcgcgcggcgaagccgctgcgttccctgagattccccaccgccggaaccaacaatttcttcaataggaatcgatagcgcaccgatggtctcctccagctcggccaccgcgtctggaaagtcgacactgaggattgccctcgcgtggctatgtatgtcgacttgaaagccgcgttcgatgagagcgtcaaacatgtaatccgccggattgattcgatggccgatattaccatgccgagaaatcccggcgatcgctcacgcggcctcgggcgggcaaatgagcgacacattcgggaagtaggtctgatatctcgcgacatcgtttgtcataataggggctgcctcgacttcagcgattgcccctataaagaaatccggcagggttccggtcctctcgcccttgtttttccggtactgctgataggctcgcccagctcggaataaggcgtcgtcgtttgtcggataacgctcgagtcccagctcggcaatgaatgcgttcaccttcgaaacgtcctccatcgaaacgcttacttcgctatatacgatgtcggaaacgatcgctggaccttccttcttgcgggcctcgagctccttcacggcccaatcgtgtattgcctccgactttttcaggattgcaatcaaaatgttggtatcaataaaggtggtcattcacccctcgtcagtttcatcaattcttcggccgacatgttcgggatcacacctgcttcctccaatttttctaatgccgcgcgggtcttccgccgcacaaactcgttaagatcgaactcatcaagatcgtctgggccgatatcatcgaaacccgcgtaccgagccaacattgcgcacactgctggtatactcttcagaatacgaggattcgtgatgtggactgcgccgcgaggacgggggtcattcgcggcgaagttctggacgtcggggagaagtgttttggttctctcctttgtagcgtcgtcggaaaaccgctcacgcgctccacaggcgtcgtacagtgctaccagatgtttgatcgccaaatccttctccagtgacctccgacctgttagttcgatgaacccaactcgcgtcaacagagatgtgtactgcgagggcgacgtctcggtcttgtcgatccttcggttttcgataatacgatctagggcaaggaacaggcagtctacccaccagcgctcaatcctgggagttgcgaactcctttatgcggccgccctgtagcaagtagttatagttcgtcgagagttttctgctcgtctcggcgacgtaacgccggtcgctctcgacaaagcgctggatgtcatcggcgcttataccccgagtatcccagttcatggttcgtgctatccgctcacggatataggcgttagcccaaagtgctggacgccgctggccctgctgctgcctggtccattttccagccatcgaaagattgaaggcgaaaagcgcaagtttatcaaaccgtgcgctgtgtttccagtttacggcctgaaaaacaagctcgtcggcgaccagataatcggaaccacgctcctgtctgttgaagaggaagaaattgattggaatgtaatcaggtctgccaagtggtctgacccgttgccggaacatctcccgcggcacgtcctccatcttcccatcgaatcccagctcgatgagctcatgtaactccgacaaccctgccgagggttgcccccagctgaagtttttggtgaagcttcctggcctccagatttcggcttcgtcggccatcgctgtccatttcgagattcgggtgtgattctatccaggaaaggtaaagattcaactggaaatagatggccccggttgctctacggagttgctgccaacccaaattttttaatacggcaacacgccggcgacgagccgacatattcgataagccactaccagaagccgtgattttatcgtagaccaatctcgatgttgagggctaatttctcagtgagaacctatgaatagaatcggttactggaacgcgatagttttcgcgggtccccaggcatggggctttgccttgcttgagatatttgtcgtggcgacggtctcactaattcctctcttgggggcggcactcagagacgttcttcctgctacttctaatatttatctcggtgacgcttttcaaaaagcatttctgagcggacaattaatcttttatgcgattgggcttatcgcgactattgtctggcaatcaaataaagattttagctcgttttttccgtggcgctcgtttttcaacatcttcagtctgattggcattgtaatttgctctctcgtgatcggatatgatcccacattaacaagtataagtccgcctttcctcgccaggtgctcactcatcctgttttttctttctcttgcggcatatactctcatggctgtgatagcccaggttcatgtaaatgttggccagtcacttgctgaagacgactccgcattggccgacgaagtgcgccgcagccgggggattcactgatggtaacggaaagcccacgcagcgtcactatttccgcgttacgcatccggcagccgataggcgacatctatgtcggaagtattccagccaagacgctcgttgatatcactgacttcgacattcgacagcttgtatctgaacgcggtatcgactcttatctgggcattcagcgcgatttagacccaaagcgcgtaagggaaatagcccagtacgttaagggtacagacgctacctttcccacggccgtcgttctggccgtgcctgaaaagtgcgtcacaatcgaatccccttgttcggcagatgatcgtttcgtgcggatgactctttccaactatcctcagggagaagatgacccagaggaggcggtgtattatcggcatatcgcgcgagtaatcgacggacagcatcgcatacgtggtttggaagggtatgccggcacagacttcgatgtgaatgtgtctatattcatcgacgcagacatcgctgaccaagcaagtatcttcgcaacggtaaacttagctcagacgaaggttagcaaaagcctcgtttacgacctgtttgaactcagcaaaagcagaagtccggaaaagacctgtcacagcgtcgttgttgcactcgaatcgaccaaaggcagtcccctttatcgtaagatcaagcgtttagggaaagcgactccagggaggtacagcgagaccctgtcacaagccacagccgtggcgggtgtgcttcagtatatttgcaaagataaaatccagattatccaggatcgccagatcgggcgaagaggtggaacttttccgcccgcgcagccggtagacgccaacaaattagtgctgcggccgttttttactgaagggcgcgatgctgacttgaccaaccttatctggaattttttcgaggccgtccaggagcggtggcctgacgcgtgggatgtaaacgctaacggaaatatgcttaaccgaactaatggcttcgatgggttgatgcgttactttcgacatgcctatcgatatatttccagcccagggaaggtggccacggcaggccaatttaaggcgcttcttgataaatcggaattggaggatgacgacttcaatccgcagaacttcattcctggttcgtcgggggcttcggcgttagcgcgtcgtctcatcgacgagacaggcgtttcttcgacctaagaaaggcccgtcacatgagcgacgaagatgacattccgcaggggctcaacagagagcagtgggccggaattctagtcgagttaaacaaacgcgaagcggccaaccagaagcggtccgaaacaatgaaggcgaaagcggctgccaagaaagccgagcggttggcgctcccgcctgttgatttggacgaggcgtggagacgacacgccgacacttgccctcatcccgcatactcccaggctgcaacgggatggtttcgtgaaaacaaaagcttcgattttgacggaactgcttggcgtcgagaacgaagatttcaaaccagcaattctggtaaaagcaaaaggctgcggagtatcacatatcatggtgccgatgggcgtgtggtgacctcttacgatgaaggaccaaatcgtcgcaacgattccgatagggactgggggctaccggatcaagttgttcgctctgccttcgctgaaattagccccaacagcgatggctgatacgggcacaatcgagaaccaaccgaaggcgtctccatgaatggtcttgatccgcgggcatatctggctgacgtgctcgatcgcatccatgatcacaagatcaatcggttagacgaattgcttccgtggaactgctcggcgatctccacaatttgacgcaaaggcagcctgatggcgacagtcacctacgtccgtactatcaattttgttgccgagattctcgaagaggacccggagcttcttcaggcaatcgtctccagcgatgataatctgagctacgggagcatcatctccgtgtactccggagacgacgaatccgtgaccgcactgacagacgacggcatggacgaattggagcaaatgctcaaagacgcccgccgctcaccccaggaatggaacgacttcctcgacagttttgttgacgacgagctgctcgtcgctcgcatcaaagcaaaatctccgcggtagcaatgaggcggttactcagcattttgccgggcataggtctccccgggtggactgccaaggtgtatttgatattgaagtcgcgtggcgtctgaccgatgagtgcgttgaaatgctcagcgaccatcgcccgtgcacgggcagggtcggttctgcgagcatctttaattttctcataattttctcgaaatgtgattggtcgagacggttgccaagccggatgcccatgaacgatgggaagatttcgcccagactccgcccaacttcgggcttgtgggattataggcgatatagttttgaggagctcggggcgcttgattgccttggacatatgtcttttagggaaggcatgcgcaaccgcgatgtcggatttggtctcttgggtcagccactaggtgcgataaccatagggacttgtgatctccttctcctctatccgttcacacaaaagcagatcgcccgaaaatgtaaattttggtcgcattacagatgaaacgagattcaaatatgtaggaacatccttttgttgttacgttgagccgaaggcatattatttaaagctaaggctttggattttatatcttttgcgtctttcctctggcatctcttcgctgaaagtgtgttataatgattgcgagcagctcttccaatgtttccgggaataaccagcagtttcggaatgttgcgctgtcaaaagaactcgatcccgacaatgttcctatcagcaggcttgattctgaaggccataatatatttgctgaatggcgacctaagcgtccgttccttagaagagaggacggtgtccttctagttctccgcgcggatcatatctttcagttgggcaacgatccacgtaccaggcagatagaagcagaactcatgttaaatcgaggcgtcgaaagtggcgccgtcttcgactttatccgctatagcatgctcttttcgaatggcgaggcgcatgcgaaacggcgctcagcctttactaagaccttcgcattccggatgattgaggcgctgcggccggagatcacgaagttaacggagcgtttgtgggacgatctactgaaagttgacgattttgactttgctgaaatgtacgcgtcgaaattacctgcgctaacaattgccagcgtacttggtctgccgtcaacggacgcacctttcttcacgcgtcttgtttacaaggtttcgcgctgcttgagtccctcatggcgagaagaggagtttgcagagattgaagcttcggccatagagctccaggattatgtccgggcaacggtaacggatagaagccgtcgcataagcgatgacttcctctcgtgctacttaaaagcggtgcgagaagaaggagcgctttcgcccatcgaggagatcatgcaattggtgcttctcatacttgccggaagcgatacaactcgtaccgcgatggtgatgctgccggctcttttgctgcaagatcctgttgtttggtcctccttatgtcgcgatcaatccggtgttgcggccgcagtggaggaggggcttcgtttcgagccaccagttgggtctttcccgcgcttggcgctcgaagagattgatctggatggctacgtattgccaaagggaagtctcttagccctaagtatcatgtccggcctgcgggatgagaagcactacgagcattctcagctttttgacgtaacgcgcaaacaaatgcgttggcacctgggatttggtgcaggcgcgcatcggtgcctcggcgaggctctggcgcgcgttgaactgcaagaaggacttagaacacttttgcgccgcgcaccgaaccttggggtgacaggcgactggccacggatgataggccacgggggtatacggcgcgccacaggaatggcagtcaagccatccgtcgatcggtgaactaatcggttcctctggttcgacggagacaatgtcgtgcatcagattcaaggttaaacgaatcgggagggttcccaatgcaattggcgccagtagatcgcgtaaccactatcgacgacctgacactcgatccctattcgatctatcgtcgaatgcgcgcgcagaccccggttgtgcgcgtcgccgcggtcaagcggacgtttctgaccaaggcttccgacacgaagatggtgaaggatgagcccgggcgcttcagttcggatgaccccctcacgccgatgaagcaggccttccaggcccaaactctaatgcgcaaggacggggcggaacacatccgcgagagaatggccatggccaaggcttttgctcccaaaacaatcgcggagcattgggatgcgatctatcgggacatcgtaagcgagtatcttgatcgcctcccccgcgggggcacagtggatctgtttgcggagatctgcgggccggtggctgcccgcattctcgctcatatccttggaatttgcgaagcctccgacgcagaaatgatacgttggtcgcagcggctaattgaaggggcgggcaacttcggatggcggcctcagcctttcgagcggtcggaccaagccaatgcggagatgaaccggctcttcgacaacttgatcgaaaagcatcaggcggaaccgaacccctcggctttcgcaatcatggtgaacgcgtctgatcccatacccatgagccagatctacgccaacatcaagatcgccatcggcggaggcatcaacgagccccgcgacgctctcggcacgatcgtctatggattgctgaccaatcccgagcagttcgaggaggtcaagaggcagcaatgctgggggcaggttttcgaggaaggcgtgcgctgggtcgcaccgatccaggcgagctcgcggctggtattggaggatacggaaattcggggttttctcgttccgaaaggggataccgtgatgactattcaggcctctgccaatcgtgatgaagacgtctttgaggacggagagcgcttcgatgccttccgccagaagaatgcgcaccagtccttcggctccggcccccatcactgtgctggggcgcaaatctcgcgtcagaccgtcggggcaatcatgttgcccatgctgtttgaacgctttccgaacatgacgctgccaaacccagacgcggtgcaatggcgcggtttcggcttccgcggaccgatcaatctaccggttacgctaatatgatcgcaactattagcgccgtgaatttctagtgacgattctcgagttaaacggacgactaacccatccgacctagaaatggaaagtggcagaagggccggtcgctgagcgaaacatgcatgcagacgcgaccagcgcgcttattgttcacttcacctggcaatcggcatcggcgcttaagcgtgaaggtgcctatctaggcgctaagacactgcttatgcagtgggaaaaatgactgtttcaacatcctgctttatcgccaagcccattgaattgcaggatgtcaattgcaaaagtaatacaataaaaattgaggctctctcactatcaaagtaggctccgagtgattgagagaagaaggagcatgcacgatggagcccagccaacgaatcttaaatgatgattcccgagcttcccgcacggaagccccttctacatcgacaaatgcggatatgcctcccgagcttttggctaaggtggcgacttatattcctacccaggacccggtagaaacggcacgaaatcttggaagcctggaacgcacagggcgtgcgggtcgtgaagccgttacaagcgatcccgtcggaaaatatcacgcgcgaatgaaacgaattggcgcttccgccagaaccgtgttcgatacggtcattcccggaaatcaattacctgagtgggagacgaaccgaccctctccgacagccagaacgaaagccgttggcccaattcttaagttccagtctgaagggggaaaatcgagatttgtcaccaatatcctcaatttaccggaatctgctcagtgcggcgcaattctcagcgtcataaagcacttggatgatcttggtgaagcaaataaaacgcgcctcatcgaacgctccatcgagattttgcggctagatccccctttgacttggaatatgggccagaaatgccctgcggccgatgtgttggtcgaaggagaaaggtacctgaatgcggatcaacgggctcgcatccaacaagagaggagcagccgtccgcgactgtctcccttgtttcgtcgagcttatgctgattttgaggttcaaaaaaacatggacgcaaatcctataagatatagggacgcggcggagcccgaggtcagacctatagacacagtaatcgagacaattgaaagatacagcgcgtcgttagcaagacggggtccgaatgatatcgggctcttaacagctaacggaagctttgagaaaaatatcaatgatgcgtacgcacgcacgcgagccgagctagatgcttcttcccgtgacagaaatcgctctggattatctcgataatttcttggatccaccgcgctgttataagttgccccatccatcgtctcgccgctgatagcaggtctcaaattacggtcccatttgtttcaaatgaaggtttcaccggcgattgtgaaatgcttgtgaaaccgagcgaacctaagttcgcctgcaggggccgtgtccaccgaacttgacagagatcgtagacgcagcggttttccggtttcacgccgcagcctaggcttgcctatccggcctcacctctcccgttgcgatctgatgcaacgccgtcgaggacattgaacgaaacgacgcaatctgcacggaccaatagtttcggaacgctcccgcttcctgacgtcgctccaaataggattacttatgaaacacatcattccgactctggtaggggtactcttggctacggcggttagtgcagcaaacgataatcatacactcgcgaccttgcccgagattgagctcgcgctaactgccggaaagccggtgaatgtcacggttgatttaagtttgtgcactcccgggaccaccgatacgccgccaacgaagacgcgtggaggcacccgcatagatgcgtataggatcacaactgacggaagcctcgcgtttgcagatcagcactttaccgttgaccgcgacgataagccagttgttcaatttcttcgttaccagatccggttagacggtgacgctgaacttacgatggttgtattcaaaatgccaagctatagacgtaagggtaccagcttggcctataagtgcgcgatcggtcatgggttaagtttcactccgcagtgagctttgctttctaggtagcgccaatccgatttcgtctagtccgcccccggtgaagaagtttgtccacggtggatcgcagctacgaaaaagctcctcattgcgccagcgcgcggttgagatcgtcgtgctcgaaggcgctggccatgcggtcgatctcggccgcgcgagcgccgaccgccttggctatctcgcgacatgtagccgtcaccgtcgcgatttctttgataatcgcgcgggcctgcggcagcgtgagcgcgaaaaactcggacgcggcctccagcagatcgagcgagcaggtgccctcgtcgagatcaatgttcgtcgtcagcacccgtgccttaagatcgttcgaaacggggttgaggtcgtatgccagcgacagagaccaacccgcctttccccgccacaagaaaacgtggttgcggagatggtcgtcgacgttggagatcagcacattgaagacgaaccgcccaagggaagacggacgcccatgccatcagccggacggcgatctcttcccaggtctccatactgtagtcgtcggtctccttccggaatttcgcgatggagagatgaccgtgttggtcgaagaccgacgcttttggacgcgcgccgccgagggaggagccaggggcgaagatgagttggaggtcctcatccgtttcctcgtcccggaggtggcgctcggtgatctggagcagccggccaagttcgatcagagcaggaacgccagcacgaatcggtgcctgaaaaacctcgtcgctaacccagcggaagcggagtgcgccaagccgggtctcgtcggcgacgccaagcaggtagtcgctttcggccagggtacgaacggcgcggccttcgcgttccgcgaggcggcgctcggcgcgctgcatgaggcggcgcccccaagtatccggcgcggagtcgcccatggagtcgaacgtcgccagtccggcgggaggagcgaaagcgccacgcgtcagtgcaagcgctggctccagcgagaagcggtccgggtcctcaagccatacgcctaagtattcgaagaggatggtctccgtgcctcgggcgcgatttgtcctcgccagtccgatcgggcgcgttcggccggccaggtcaacatgcacctcgaagtcagccatcgcgggacgatccggccgggcgcttgagatggacgtgcttgggctggtcggcgctggccagtgcctgcccgacgctgtcgttttcacttctctgcgtcaccaggaagtttttggtgtgttgatgccttcacctttcatatttgccggtgatagcaaggaaagctcttttcatcgggtttctttccgcatcccttcgacaaatcccagcccgacgacggtccgatttcaaatgtagcatgacatcggttcggccgaccatgcccaagtggtagagtcgggctggtcgaagcgatattggaggctgatcaatggataaagaaaagcagcagaccggcatccctcatgactctcccgctgttggaagcgatgcggaaccaaaaactaattttccacctgaactgctcgccgaaattgcgacacatttgcactccgacaatccggtggaaacggcaaataatctcgcgaattttcagctcgcaagtcgccaagtacgggatgcggttcaggcaagccccgttgcgctatttcatgctcgagtcaaccggcttggtgcttcagccagggccctatacgacgcatcaatacccgacgatcgcttaccggaacatcccggagatgacctgccggcggtgccatcttaccatcccaccgaacacatagtgttggaccaattcttaaattccagtcttcaggggcaaaaagtatgatcgtagatcacgttctcgatttgtctgaagcatttgatcaagctctggcgattgcgagcgttgcgcgccgcctcggtgattttgatgcggcaaatagaaacaggttggtaggccgagcgattgagatttttagacaagatgaatcggtagacactagccgtatcgctgcccaagcgctcataagcgggcatgatcatttaaacgaaattcaaaaagctcaaattctgaacgcgatagttgaccatgaggagcttgcacaagtttataccaggatgacccatcatcgggatcaaagccggaccgttgcaactctttctgtgtccggccatacgtcagtgtcgcaaggcccacttctggaaaagaccgtcgacacgattgagaaatcggtcgatgcattgataacagatgcgccaatcagttcgaacgagcaatttcatgccgttcggccgatcgcgaaatccattgaaaaagcttacaatcatgcacgagctgagctgtttgtggcgcggcgatctggatgaggcggaggccgcgacaatctggcctgattgtcgctacgcagctgttggcctctccccggggaagagagaattccggcgcaatccggtgagctagatgctcgggttgccttaacaaaatagctgccgatcgctgattggcccgttgcgcccgcttggcgcagctcacccaatccgagctgcgttgcccgtactttcgccggattgcacatctaacccgatatcagtttgccagatcgcacccaaagttcggcttctcgtggctgctgaataactggcccaccgatccgctcctgaccgaggaattaaagcgctcgaacaccggacatccggtttaaacgcgtgaaaatgccgccaatgttgaactcatgatccggatgccgaggtggcttggatagccggtcgcaaatttcacacgaaccttgcggtcagagccgatgttcattggacttcctttggggtattggcatattgccctggtcgttgacactatcgccaccccgtgtcagcggcacgacctgtcgccaacttagcctttggtgacagggctaaaattcaactgatccccttgaccctcaataagattgggtaaaatagagcacaaccgtgcttggcagctggggatcagttcttgagaacgctttcgaatggtgcttgttcaaaattgcgagcttcgatcagcgcttcaataatcgcaatagtcaggcgcatgatacaatgatcagtgctccttcgatgaccttctgatgtagagcgaagcaaatccaatccttgggccgacaccatctcttcggcgcgattaatcgtgagcgtccggtgaactcattttcgcgtggttgagggagcgaagctataggacgcgtttcatttcatctgccatgacgcgctcgatgatctcggggtcgcattgttcgtcgacgagaaactggtggataccaccatcccacgtccttatgtcggttaggagattttgaagttcgtcgataccattctcggtcagacccttcgtgccatcttcactgccatcgctgacgtaaaccagttcgccctcggagatgttgtccgagttggcggtcacctcctcgatgagttcgaggttctcgccgatcatgacggcgacttgcttgagcgtgtagatgaacctcgagcgtgccatcacgcaacctcgcatcggtctttcgctggcgtccagttccagggcaataggtcctcaagtcggcccttggggtgatcctggatccgggtcaggacgtctgtcagatagacctccggattgtggccgtgcaatttgaccgtttcgatgatggtcaggatgttggcgatgcgctcaccgcccttatccgagccggcgaagagccaatttttccttccaattccaatgccccgttcattctgcccatgtcggcgatgaagtcgaggtctgttatcgctggcatccctatttcggccagagggtttccattcgccgcgtcgaagaacgcgcgacaggtcggtttttgaaggttttggggccgaccggtatcgtgatctcgatttcggggtggatgattgatccctttgtgtgcggcggcatgaccataggagcggcgcgcgtcgatcttgcggcgctgatcgaactgaacaggctggtcaccggcagtgacaagcctgcactctcccggggtggacgtagaatcactcaggaggaagatgatgagaccccgcaacacgctggtgccggcgtcgggccggcagctcgacctgatattcaaaacccggacgctcgacggactgagcgaccacgaccgcaagaaggcgatattaacgctggcttgcctgctgatgcaggcggccggtcaggtcgtcgaggagctcaacgatgaccagcactgatttgtttccgacagcgctgctcgcgcgcaaggccgtcgtttatgtgcggcaatccacgcagtcgcaggttatgactaatctggaaagccagcgacggcagtatgatcttgttgatgtcgcgcgacaacgcggcttcagcgacattgaggtcatcgacgacgacctcggacgctccgccagcggaactgtcgcccgccccggcttcgaccgtctcgtcgcgctgttgtgcgccggcaaggttggggccgttttatgcctcgacgcctcacgactcgcacgtaacggccgcgactggcatcatctgctcgaactatgcggcctcgttgaggcccgcgtcatagatcacgatggtgtctacaatccatgtcggcccaacgatcgtctgctgctgggaatgaagggcagtatcagcgagttcgaactaggcgtgctgagagcccgcatgctcgatgccgccagatccaaagcgcgccgtggcgaattgcgactttccgttccgttcggctacatttggcatcgagaggccgggcttgggctcgatcctgatctgcgtttgcaagaggtaattcgatccatcttcgcccgcttccacgagcttggaagcgcgcgtcaggtgctgctgtcgatgacgaaagatcagatccacttcccgcggccgtcggacgaagggcgcatgaccaacttcgtctggacgccggtccgttatcgcaatgtgatcggcatcctcaaaaaccctttctacgccggggtctacgtctatgggaagagtgagaagcggactgccatcgtcgatggacgggcgcggcgcagttacgggcatggcaaaccggctggtacttgggaggtgatgataaaggaccaccacgagggttatattagctgggacgagtacgagcgcaaccaacagcaactggcgctcaataattatggccgctggggcgggactaaatcgggccgcggcggcaaagcgctattgtcgggtctcctaacctgcggacggtgtgggcgacggctgagtgttgcctatacgggcaatccgcaaagtcctgtctatcgatgctataagcagaatctgatgatgggcctgccccggtgcatgacgttcggcggcccgaaggtcgatgcggcggttgcgcgcgagttgttgcgcgcggtagaaccgttagcgatcgaggcgacctttgaagcagagcggatgaaccgggaacggcaagaagaccagcgccacattcacgatctggagctacaacaggcccgctacgaggctagcctcgccgagcgccgctatgcggcatgcgatcccgacaaccgcctgatagctgcacagcttgagaagaattgggaaacggcgctacgccgcgtccgtgatctggaagtgcgcaggcctaccgaaagtccttcaaccatcgaagttgacccaggcactttcgcgaacatagccgacaatctcttggcagcctgggagtcgccggatgtcaccatgcgcgtgcgccagcaactgctgcgtacgctcatcgccgacattgtcgttgatgtcgacgatgcggtgcgcgacgtggtgctgacgattcattggaaaggcggccagcattcagagttgaaagtccgcaaacctcggactggtgaacacggctgtgccaccacggacgatgctctggcggtgatgcgcagtatggctggtcgctggtccgatgaacatatcgccgcgtcgctcaatcgaatgggcatgccaacggggcaaggaaaaacctggaccgcacaccgcgtcgcttccgtgagacgggtacgcgcaatccacgcgtacaaatcagccgacaaggacggcgactggctgaccatgacagaggctgcggcggctttgggcgtgaccaatcatcggatacgccatctgatcaagacgaaggtgctgtccgccgaacaggtggttcgcggtgcgccgtatcaaatcagggccgccgacctggattctgcgacggtcaaagccgcgatagcccgaaagggcagcccgtgtcgcatcgccgacgcggagacgcttccaatgtttacagacacttaaagaaggagtgcataatgactcaggtctggcaagtggacgcatggctcgttcagctatgttgttatcgatttcgacacggccatcgtcgatgtaaacgctcaacgctgcccatcgagagagggcatatcgcattgcctcggccagcttctgcttctgcggcaacgtcgaaagcgtgtcttcgatccagaccttcagttcttccagaatgggcctggcgtgttgttggcgcagtgtacgccgctggtcggccggcatgccgcggatacgatcctcgatatcgtagagcgcgccgatgcgcgatagcgcttcgtcagcgatcggcgatggcttcagcttgatcacgtcatggaacttgcggcgcacatgcgccatgcaggcggcctcgacgatctggttgccgtagagcttcttgtaacccccatagccatcggcatgcatcacaccgctgaagtttgcgaggtggtcagccggatgcatgcccttgcggtcagggctatagtaataagcgatggcaccgggagtggcggcttgatagccactgccgtcgaagacgtagacccagaccctgccggtttttgtcttgccccgtccggggtcgagaacatcgacgggggtatcgtccgtatgtattcggtcaagcgcggcgatatgggccctgatagcaaagacgagcggcgcaagcagacccgatacgcggccgacccagtcagccattacggatcgggagatgtctatccccaaccgatcgtacatctcggacaggcggtagagggggatgtgatcgtcgaatttggcgatcatgatatgggcgagcagtcccggtccgggtttgccgcgctcgatcggcagggtcggcatctcgccagccaccgtcgtatcgcactccctgcagatcatgcgcttttcgacatggcggacaatcttgaccgacgccggcacgtgctccaacacctggaccaccctgtcggcggccttcaggaacgatgtgccaccacaggtcgggcaattgcagggggccgcatagaccaactcttcggtgggaagaccatcgggcaatggtttgcgcttcggcttgtccggcgcgtcgtccaactccggcagaggagttttcccggagcgcatttcagcctcggcacgggaggcctcaatctcctccagcatcagttcgaattgctctatcttccggtcgatcttttccgaagacgcgccatgctgccggtgtcggagcaattccagttgtgcccgcaacagcccgattatggagtcgcgcttgatgacctcggcttcctggctctcaagtttcgccgcctgttccgcgacgagtgcgcgcaaagcagttagctcgtcctgactgtccagcggggctgtttccatacccgcaaatctagccgatttgcccctggcacgccaccaatataccccggatgcccctgcaaaatatagcttttatcccgttcgaccgggagcggaagtccacgccgggcgtcgccaatcgatcccctcaacgagcatcgaaagctgcgcctgcgtcaggtgcgccacgccctctttcgccgtcggccagggaaagtatccgcgctccaaaatcttgtagaacaggcagaacccttgaccgtcccaccaaagaagcttgatccgatcagcgcgttttccgcggaagccgaagatcgcgccggagcccggtgcctccttgatcgccgtctcgaccagcgccgatagaccgtcaatgccacgccgcatatccgtcaccccgcaggccagatagacacgcacattccccgaaggcccgatcatgccgcctccagacaggccaccagcgacgtaagcagcttcagttcaacgccaatcggaaccttcaagcaccgaccgtttcggagcaagatctcgacaaccgctggcctcggtagcgtggtagacgcctggcttacgcccacctcctcggtaatctcaaccggaaggaacatcgccggtcggtcaacatagctgaatgactgccgccacaagcggatctgcccaggatgaatgtcatgccggcgagccacatcaccaatgcgagcgccaggttcatccgcctccgccaatatcctcagtttcgcctcgtccgaccagcgccgtctgcgctcagtaccggacatgatctcaattcgagccatgaaacctctttgatctggtattaatgtcagcactaatgctggttctaatgccagagcatcgcctgatttgcccgatcagcaaaaaccgctcaccggacgctcacgattaatcgcccattctgtaaagctcttcgaacctgacatcgctcttcccgataggcaccgctatccgtgttgctgccgcccttcgagggcgggaagaaaaacaagcagttaaggcgcagcgaatcgtccgccgcttcgccaacctgccgttgtgaaataggtttcctcttcgcggcaaagtgcgtctgcgtctcttatcaggagatggagctgctagccggtcgcggcacgaacagtatcgatcggcggacctattgacgttcgcatcgtcggaacattagcgctggccgtccgagccagtcccttcacgaatgatccgaggaaacaaccgcggaaggatggccgtccccgcccaaatgttttcagccaagccgtccaacacggctccgatagaccggtcctgcgcagcacaccctttagagcgagtcgcggagcttgaaaagcgatcaggatggcttgcggcaattcgctctccttcgagcagtgaattcggtgatcgtcgcacaaacgctattgagaaagcaggcgcggaactggaaagtctagcaccttgtccgtgtaactttcgaccaaggtgctaaacggcgtgccgtctcgaagtttcagtacggcacgatgttcgaggaggaacggcgccagcgcaagagaacccgttccaggcgcgatcaagccatccatgtcccagccttcggatagaggggaccagagtaacttggcggataagtttgtgcgagtgaaattgagagccagaacggctctgccgaacgcaatatcgctggtattcaacgcctgattcatctcggccgttaatcttgccggcacataccaattgtcggcctcggataggacgcggtcgccgcagaccaggcgaacgcggcgataagcgatcggttcgtcggacccaacgctcaagagttcgcggatgtgctcatcggccggcttgtcttgcccgcgcacacgctgagctacgatcttggaaccttccggtgcgagcttgtgcgcggcgcaccagcgatcaagggtcaaagtagcactggcgttaccgaggagattggcgttcaacgtctggaggaccgcaagcgcttccactcgagaggccggcgtgttcagccactgagaccccatagccgcgtcttgcgcaattgcgatctgcgtgccgagcacgatggaggtcgctgttagtgcgacgatgcgaatgcatttcaaaaagcgtaatgacacggagaatgaaatcctttgtgcagcaaatttgatgggcgaaccttgcgggtcaaatttccttggttttaggaggcgaaagcggctttaccggtggacagcaagcgttggcgagtgagataccacatttggttttcgtccaacgcggcaacaattttcatgatggcatatgcaaatccaatagacttgggtttcaagccaggggcgtggcggccggttggaattctcccaagtccgtcaatcgtttttctcacatgccgggctggggctctttgtcctccccctcgctcattgcgagatgctcatatagctggatcggataaaatagctcgcaaccgaaagcaaaatcgaggagcaattgttcgaaaaaggacctcctctttgacgtggaacgcggccgccgatcgggcgacaattgtagtccaggtagggatacgccgtcgatggttgccaaacgcaggtgtgagtcaccgctgcgcttgtctgattccttttggtgccccatgtcatcgtactccttgtgtaagcctagcgatgatatgtgcagtccatctgcagcataatgattacgggagagcgaagattggtttcaaacgtagccaaataagcctgccgtaagtaatgccaattggtcaggaccaggcacggcacgcaatccttggctttgttagtgtacaatgaagacgtgcaaaacgaacggctatcgatgcagatcgactttcgatctatggccgacgtgggcccaatcgggatctgcaaccactggaactcgacaccggggaaaatgcctcgacggcagaacgctctttcggaagtaattagttactcaattgagacgttcgaatcgctttggctttggcgtggggccgccgcgccgtccatagccagtccagcaggctaaaatacaaagtggcagctcattgtatccgcatcaatgtggctgggccaacgggctggcgtgcaccatcttccggccattgaggaaaatcgcgttcctgcatgatcgcatgttcgagatattctttggctatggcctctatgagatcttgttgccgctctgcatcaatatctggcaactggttgattgcgagatcgtgttttcttgcgaagcgaatcgcgcaacgatatccgtcgatatcttccaaaatcggtcgggtggcagggtagttccagagttccgccaattcctccaacaacgaggggcgatcttccctgatggcaaacatttccgtaacgcgttgcttggctctcgccagaaaggcgtccgaatccccaaggcgcaaccgcttaacgtgccattgaaaaccagatttccaatacggacttttggccatgcagttgagaagtgaaaccgagccgccctccaatatgagcccctcttcggactcctgccaatccacttccaaaatgagccggcgatgggcgccctcggcgtcaatgatacctttggtaaggcggcgagaatccaaatatattctccgcgttgattgcaattccgatggcaaaggccttccgctaccggtcgctatttgaggacagcactgcacacgatcaagggcaaccaccggccacccggttttttgtgcgatttggatcgcaatgtccgttttgccgctgcaagtcggtccgtagatgagatagagcaacacgtgcgcctcatatagatttaatggaataccccatctgtgccaaaccagatcttccaattcggatcttgatttttactgtgggaagcgtagcagctatacgtgatcggctgaactaatatcgcgctacacttgtaattgtgcaacgctgacgttgccggctcacacgcctatgaaagcttccatccccttgtccgtctgagcaatcggggcgctgcggcacgacccttgcttatggtggacgcagccgaccctgttggcgcaatgtcgaaaagcgtataagcgatttgggtagggaagcacatcagccgtgcggtacgcactgtcagcatccgacggttcatgctgaagcttttcgggatgacctaaaatgaaaaatgccgctgaagaatatataatggatatgcgcatgaaacagtcgattgcgtttcaaatatcgccgatgtcctggatcttacgaagacgacagctttgaggcggtacgaacacacacttaaatctccgcggcgcccgccacggcagtgctcgccgctcgtagcatagtagcttgctcaggcgatgcatgatcagccattttgtctatgctggcgatttcatttcttttcgatacaaaccgcgatatcctgaaagccaccacgcgcagtcaaacaacactcggcgactggaaacatcgttggaatgccagggctgtgtttcatttgaaacaaactgagtcgacgtctgtgatttcaaacccatttacaaagcctaccgtgcggcctaagcgccacgggagtgggactgagcgttggcacgaggacataagtgcggatgaatggaaggtattcaccgactcggcaagatttcaagacaggcgccaagtcttggtctgtcctggctctgatagttgctgcaatgatttttgccttggtagcgattgcgtgctggcaggacaatgaaaccaatcgggcaatcctgacccagttgcgggcgattaacatcgacagtgcctcgctgcagcgggatgtactccgcgcggatgcgggtatggtggggaactaccggcccattatctccaggttgggggctttgcggaagaacctggaaaatctgaagcgattatttaaacaatcccatcttgtgagcggcaacgatttctctcaactgctagaccagctaaagatgtctgtggatacgaccgacgcggccgtcgcatcctttggaacgcaaaacgtgctcctgcaagattcgcttgcgagcttcactcgcgcgctgagtattcttcccaagatgtcgtcgacggatcagacggtcgaaaattcgatcgaattgggcagcctgatgctgcagtttacgcgtcagccaagcccagcactttcgttagagatcagtcgcgaactcgacatgctccaaaaagctagcggtggggatgaagctcctatccgtatacttacacgcgagggtcacgttatcttgtcgcttttgccccgggtcaacgatgcggtaaacatgattcaggcctccgacaccgctgaaattgcggaaaggttgcaacgtaagtgtttggaggcctatagcttacaaagcgtgagagagcagcgggcgcggatcttcttgagttccgtgtcggtgggcctttgcatctacatcatctcactggtctataggttgcgccggaaaacggattggttagcgcggcgtttggattatgaagagctaatcaaagagattggggtttgttttgaaggcggtggggccacagcttcgtccgcgcaggctgcgcttggaattattcagcgtttctttactgccgattcgtgtgcgttagcattagtggaccatgggaacaggtgggctgtcgagagtttcgctgcgaagctgcctgagccagtctgggaggacgaggcgctacgcgaaatggtctcttttgccaaggcggacgaacgtgcgtcagtattccgcatcatgtcgacgcgaaaggtcggctgcttttctccagaaattccaggcctttcgatactattggcacacaaatctaccgatcacctgacagcgatttgttcactaagttaccaaagctatcgtctgcgaccctgtccgggcgaaattcagcttcttgagctcgccaccgcgtgcctctgccactatatcgatgttcggcgcaagcagtccgaatgcgacattctggagaggcgattagagcacgcggaacgtcttcaggcagttggtacgcttgctggtggaatagcgcatgaattcaacaacattttgggagcaatcctcggctacgctgaaatggcgcaaaactcgctgcgccggtcatcggtcacccgaagatatgttgaccaaattatttcgtcgggtgacagagccaggctcattatcgatcagatcttagctctaagccgaaaactagaacgcgtgacaaagccgtttagtgtctccgagctcgtgatggagattgctcccttattgcgtgttgctttgcaacgcaacatcgagctgaatttcaagtttgatgataagaagagcgtagtcgaaggaagcccgcttgaggttcagcagatactgatgaacctttgcaagaacgcttcccaggcctttaccgccgatggtcaaatcgacatcttcattagccgaacttttatatctcgacagaaaatactggcacatggcgttatgccagccggcgactatgttcttctttctgtcagcgacaacggtgaaggcattgccgaggctgtgctcccccacatttttgagcctttctttacaacacgctctcgcagcggcggtacgggtctaggtcttgctgccgtgcacggtcatgtcagcgcgcttgcaggatacattgacgtaacttcagctatggggcgagggacgcgcttcgacatttatctacctccttcctcgaagaaccccgtcagccccgacgcgttttttggccgctgcaaaacaccgcgtggcaacggagaaattgtggcattggttgagccagatcctgtcttgcgagaggcgtacgaagataagatcgccgctctgggctatgagccggtgggctttaagacatgtgcagaactttgcaattggatgtcaaaaggcgaacaagccgatctggtcctggttgaccaatcgtctctttccgacaatcagagtgctactgccttgcatgcagccttcaagacagcgtccatcatcattggaggaagtgatcttaaaatgtcgctttccagggatgacatgacgtccgcgctttttctgcccaaacctatatcctccaggaccatggcctacgcaattcgcaccaagatcaaagcctagagttgaggagtattcgggaaacttaacgtctgttcggcgcgcctaagacagatggtcaggccgagatagctgtggtttcttccagtcgctttcggcagccggttgtggcggtcgtttcccgagacccaaaggttggcgattatctgctgggcctttcgatacggtcttcggtgaacaaggcaatatgttcactaagctcacacgcaggatagtcgctatgggcggacaaacagccgtctatcgagaacatctgcatggcgtaatcacctaaatgtctttgttcgtttcgagcgtcgtagcggctgtccgactaaataagcgacggagttgcgacaacccatatggcgaccccgctttgcttcccgcgggtctgatcaatgttgttgcttctggctttttgcaaagccggcttttccgagcgttcggcgccgagcgagtttagcgatacgctcctggacaacatcgctgctgatatcggcggaatcaaaccggccgccgtacaagcgcatgaattcgcgatgctgaggatgccgcggtttggccatttctttcaggaagtccgtgaagccggatgttcggccaacatcctccggcggcgccctgagctcaccatcgaggaagcgcggatactccaggaacggattgcgatccttgatggcttcgattgtgatggcgtgctgccagttatcaccgaagtcataggtataggtgaaggtcgacacaccgcgatcgatgagtgctgcaatgcagacgttgcgagcggcataagtcttgcggtcgtaggcgtcttcaggatcaggtacatcatatcgtctaccaccggcctcaaactcgaagagatgataatcctcaaacagcatcgtggcctgaatgacgtcgtggagacccttgaggctcaagtcaagtggcacctcgatcctgcgccagatcgctggttccatcccgttgagttgaacgagcaggcgagctaagcgatcgggcggggtcatggggccaaaaccaaggttgcgcgttgatctttccaactctggggcagcaattcctcgatatgtgtggttggcatgcgccagagcatgcggagcagccatgcctgaccgtcgatctcgttgagctttgccgtcacgactaccctcgctacgcaaatgacactatcgacaccctgatcggaacctgcgaagaaccacagttcattgaaaccatctcccgtccatttcgcccatatcgacccgatatcgacagtgagatcgcagttcaacatcgttgccgataacgttaagccgtacgaattcacagcttgtattggagccaccgccgtctaggcttgatggcaagttgcatgtccggcgagaatcatcgcctgcgtgctggcaaggtcgtcgggaggctgatcggccagatcggtcatgagaaacggaaccatattcgctcccatctttccagtcatatcgcgatcccgtgcttgatccacgatttccaacatttggcattgcatcacagggtgaccgtcaccgtgcggcgccgaatttaacttcggtggcattctagatcctcgccgttatcctagagagccatctttcgtcggcggacccttgagtgcttggaaaaccgttttcgcttcaaatgaaatcgaaaagaagaaaacgaaaatcctagagtaaccgaccctcccgataatcgtgaacatcagatgatagcatttcttctgaccgaaggggctgtgttggttatgagcttggggagatggggaatcttgaaggcaacggggccgctgtcgatcatcttattggcctccacctgcctctcgagcggtgcggccccactttcatttgctgagttcaataattttgcacgcgaatgcgccccatcggtttctccatctacgcttgcagcgatcgcgcaggtcgaaagtcgctttgatccgcttgctgtgcatgacaataccaccggcgaaacacttcactggcagaaccaggctcaagcaacacaagtcgtgatggaccgtctcgacgcacggcattcgctggatgttgggctcatgcagatcaattcccggaatttttccgtgctcggtctgacacctgacgaagcccttcaaccgtgcacgtcactatctgccgccgcaaacttgcttgggagccgctacgctggcggcgacacggctgacaaaaagcaattggcacttcgtcgggcaatctctgcctataacaccggtgatttcacgcacggctttgcgaacggatacgtgcgaaaagttcaaacggccgctcaacagcttgttcccccgttaaccgagcgtccgaaagacgatcgtgagaagccgagatccgaggaaacatgggatgtttggggttcatacaagcgtcgttctccagagggcggagctggcggttcatccggtccgcctccgccgccagaccaggacaaccgcaagtccgaagacgacgatcaacttttgttcgatttaaataaaggaggtcagcaataatgcgacactttgaaaaataccatgtgcatatgaatcgcctctcgctctcgaacgcggtgatgcgcatggtatccggctatgcgccgagtttgggtggcgcaatggggtggagcattttctcctccgggccggccgcggcccaatccgcaggtggcggcactgacccagccacaatggttaacaacatatgcacgtttatccttggtccgttcggccagtcactcgctgttcttggcatcgtggctatcggaatctcctggatgttcgggcgcgcttcactcggtctcgttgccggcgttgtcggcggcattgtcatcatgtttggagccagcttccttggtaaaacgctgactggcggtggctgatgaatgatcgtctggaagaagcaaccctttacctggcggcgacacggcccgcattgtttcttggggtgccgctgacattggcgggactattcatgatgtttgccggctttgtcatcgttatcgtccagaacccgctgtacgaagtcgttctcctgcccttgtggttcggagcgcggcttgttgtggagcgagactacaacgcggccagcgtcgttctactgtttttgcaaacggcgggaaggagcgttgatggtctgatttggggcggcgcaagcgttagcccaaatccgatcaaggttcccgcacgagggagaggaatggcgtaatgctcggcgcaagtggcacgaccgaaaggtctggtgaggtctatctaccctacgtcgggcacctcaccgaccatattgtccttctagaagatggatcgatcatgacgatggcgcacgttagtggcatggccttcgaactcgaggaagccgaaatgcgcaatgcacgttgccgtgcactcaacacgctcttgcgcaatattgctgatgatcatgtttcaatatatgctcacctcgtacgtcatgacgatgtgccgccgtcacctgcgcgacatttccgcagcgagttctccgccaatctgagcgaagcttttgagcagcgcgttctctccggcaaactccttcgcaatgaccatttccttacgctgatcgtgtttccccagaccacgcttggcaaagtaaggcgcaggttcactaaactccacaaaaagaaagaaaacgatctcgcaagtcaaatcaggaacctggaagatctctggcatgttatcgctggcgctctcgaagcgtacggcctgcgccgtcttggtattcgtgagaagcaagatgtgcttttcacggaagttggagaagccctgcggctaataatgactggtcgattcacgtcggttccggtcgttagcggttcgctcggcgcctcgatctataccgaccgagttatttgcggcaagcgaggactcgagatccggaccccaaaagacagttacgttggatccatctactcgtttcgcgaataccccgcacggacgcgaccgggtatgctcaacgcgctactgtctctcgatttcccccttgttctgacgcagagcttctcgttcctgactcgcgcgcaagcccacgcgaagctcagcctcaagtccagccaaatgttgagctctggcgacaaagccgtcacccaaatcagcaaattatccgaggcggaggacgcgctggcgagcaacgaattcgttatgggatcacatcatttgagcctttctatatatgcaaacgatctcaataatcttgccgatagaggtgctcgggcccggacgcgattggcggatgcaggagctgttgttgtccaagagggcattggcatggaggcggcctattggtcgcagctgccgggcaactataagtggcgcacgcgtccgggagcgatcacttcgcgcaacttcgctggtttggtctcgttcgagaattttcccgagggttctggctcgggtcactggggcgacgcgattgcacgctttcgtaccaatggtgggacgcctttcgactatatcccgcatgagcacgatgttggtatgacggcgatattcggtcccatcgggaggggcaaaacgacgctcatgacctttatcctcgccatgctcgagcagagcatggtcgaccgtgctggtacgattgtcttcttcgataaggaccgtggcggtgagctgctggttcgggcgacgggaggaacatatttggcactccgtagaggagtgccgagcggattggcgccattgcgtggcctggaaaatacaccggcctcacatgatttcctgcgcgaatggatcgtggcgcttattgagagcgatggccgtggaggaatatcccccgaggaaaatcgccgtctggtgcggggcatccatcggcagctctcgtttgatcctcacatgcgctcaattgccgggttacgcgaatttctgttgcatggacccgccgaaggtgcgggagcgcgactccaacggtggtgccgtggcaacgcactgggctgggccttcgacggcgagctcgacgaagtaaagttggatccttcgattacaggcttcgatatgacgcatcttctcgaatatgaggaagtatgcgctcccgccgcggcatatcttttgcaccgcattggcgccatggtcgacggccgtcgctttgtgatgagttgcgatgagtttcgcgcctatttgctaaaccctaaattttcagcggtcatcgacaagtttctgcttaccgttcgcaagaacaatgggatgctgatactggcaacacagcagcctgagcatgttctggaatcgcaactaggcgccagtctcgtcgcgcaatgcatgacgaagatcttctatccttcaccgacggcagatcgatcggcttatatcgacggactgaaatgtactgaaaaggaatttcaggcgatccgcgaagacatggcagtgggtaaccggaagtttctgcttaaacgagagagcgggagcgtcatctgcgaattcgatctgcgggaaatgcgcgaatatattgcggtactttcggggcgcgccaatacggtgcgcttcgtggatcagctgcgcgaggccggaggagacaacccatccgcctggctcagcgaattcatggcccgttaccacgaggcaaaagattgatcaaaggtggaaaacgatgaagacaacgcaacttattgctgcggccctggccgtcagccttctttcggtggggccggtacgggcgcagttcgttgtcagcgatccggcgacggaggctgagaccctggcgacggcggtcgagactgcggataatctcatacagaccacaatgatggtggcgatgttgacgtcggcttatggcgtcaccggactgctaacttcgctcaaccagaaaaatcagtatccctcgactacaaacctggacaccgagatgttttctgcgcgaatgccaatgtcgaccacggcgcgtgcaatcaccaacgatgcagatcgcactgtggttggtggcgacgctgaagcggacctgttgcggtcgcagataacgggttctgcaaatagcgccggcattgccgctgacaacctggaggcgatggacaaacgcctgacggcgaatgccgagacgtcggcacagctttctcgctccggcaatatcatgcaggcaaccgtcaccaacggtttgcttctcaagcagatccacgacgcaatgattcaaaatgtccaggcgaccagcttattgacgatgactaccgcgcaggctggccttcatgaggcggaagaggcggccgcgcaacgcaaagagcatcaaaagaccgcgaccatttttggggcggtcccctgagatagggcaatttgttcgcaccgctcatccgcgcatttcaggatgcgggttcattgtatccgacattccgcgatgagccagccaagttcaggtccaaacgatgaatttcacgattcccgcgccgtttacggctattcatacgatcttcgacttagcctttacgacaagcctggatacaatgattgggacgatccaggaggcggtgagcgcgccgttgatcgcttgtgtcaccctttggattatcgtccagggtattctagtcatacgtggcgaagtcgacgtgcggggcggcatcacgcgcgtgatcacggtcaccgtcgttattgcccttatcgtcgggcaggcaaactaccacgattacgttgtttcagtctttgaagagactattccgaactttgttcagaagtttagtggcagcggccttccactgcagacgatacccactcagctggatacaatgtttgccctaacccaagccgcatttcagaaaattgcatctgaaattgggccgatgaacgatcaggacatccttgcttttcagggggctcagtgggtcttttacggcacactctggtctgcgtttggaatctatgacgctgtcggaattctgacgaaagtgcttttggcgatcggtccgctgatccttgtaggatatatctttgatcgcactcgcgacattgcggccaagtggatcgggcaacttgtcacctatggtctcctgctcctcctgctaaacctcgttgcgacgatagtcattctaaccgaagcgactgcgctcacccttatgctcggtgtcattactcttgccgggacgaccgcggctaagatcattggtctttacgaactcgacatgttctttctcaccggtgacgcgctcattgtcgctttgccggcgatcgccggcaacattggaggcagctattggagcggcgcgacccaatctgccaacagtgtgtaccgccgcttcgctcacgtagagcgacgctaggtcgcgcgaaaaaatcgcgtcaatggagaaactttatgaaatattgcctgctgtgtctggcactcgctttaactggctgccagacaaacgacaaattggcgagctgcaaaggcccaatattcccgctaaatgtggggcgatggcagcccacgccgtcagatcttcagcgcagcaacgcgggtggacgccatgaaggggtctgaatacgccttgctggtagggcgggaaaccctggctgagcactataaggaagtggaatcctttcaaactgcgcgtgccaaatcagcgcggcgtctctccaaggtcattgcagctgtcgcaaccgtagctatcttggggaatgttgcccaggcgttcaccattgctaccatggtgccgctgatcaggctcgtgccggtatacctatgggtacggccggacggaacagtcgacagcgaggtatccgtctcccgactgccggcaacacaagaggaggccgtcgttaacgcctcactgtgggaatatgttcggttgcgcgagagttatgatgccgatagcgttcagtacgcctatgacctggtatcgaacttcagcgccccgacagtgcgccaagattatcagcaattcttcaactatcctaacccaagttcccctcaagtcatcctcgggaaacgcggtaggctggcggtcgaacacatcgcttcaaatgatgtcaccccgggtgtgcagcaaatccggtataaacgaaccctcgtcgttgagggcaaaatgccggtcgtgagtacttggactgccacagttcgctatgaaaaggtgaccagcttgcccggtagattgaggttgaccaatccgggaggcttggttgtcacctcctaccagacatcggaagataccgttttgaacgtaggccacggcgaaccatgacgaaaaaagcatttctcactttggcatgcatacttctcgctgcgattggcgcgaaggctgaagacgcgccaaccgcgggcagacttgatccgcgcatgcgttatctggcttacaatcccgatcaagtggtgcgcctttcgacggcggttggagcaacattggttgttacattcggggctaacgaaacggtgaccgcagttgccgtttccaatagcaaagatctcgcggcccttccgcgcggaaattatctattcttcaaggctagccaggttcttccgccccagccagtggtcgtgctaaccgcgagcgacgccggtatgcgacgctacgttttcagcatctcttccaagacgctgccgcacctcgataaagagcaggccgatctctactatagcgtacaatttgcttaccctgccgatgacgcggccgctcgccggaaggaggcacaagagaaggctgttgcagaccgtctacgtgcggacgcacaatatcaacggagggcggaagatttattggatcagcctgccacgaccgttggtgccggcgacaagaattggcactatgtcgcccagggcgatcgttcgttgttgccgctcgaagtcttcgataatggatttacgacggtatttcacttcccaggcaatgtacgcatgccctccatctacacgatcaatccggatggcaaggaagctgtcgccaactattcagtcaaagggagctatgtcgagatttcttcggtttcccgtggttggcgtctgagggatggccaaacggtactatgcatttggaatactgcttacgatcccgtcggccgcaagccggagacaggcactgtgaggcctgatgtgaagcgcatcctaaaggaggcgagacgatgaacgacgacaatcagcaatcggcgcatgatgtcgatgcgtccgggtccctggtctccgacacacatcgccggcgcctttcggggtctcaaaagttgatggtaggaggtgtcgttctcgcgctatcccttagcctcatttggcttggcgggcgtcaaaagaaggaaaacgggaacgcaccgccgtcaaccatgatcgccacgaacacccagccatttcatccggttccgattgcggttacgcccgatcctccgcctgcccaggaagctgttcagccgactccacaagcgcgaagtgagccggaacggcatgaaccgcgtccggaagaaacaccgatttttgcgtacaccagtggtgatcaaggaaccagcaagcgcgttcaacagggcgaaatggatcgaggacgcggaggcaatggggaagacggccctttgcccaaggttgaagtgtccgccgagaatgatctgtcgatacgcatgaaacccaccgagctgcagccgaccagagctatgctcttgcctcatcccgacttcatggtgaccgaagggacgattatcccgtgcatcttgcaaacggcaatcgacaccaatttggcaggttatgtgaaatgcgtgttaccccaggatgttcgtggaacaacgaataacgttgtgcttctcgatcgcggcaccaccgtcgtcggcgagatccagcgcgggctacaacagggggatgcgcgtgtttttgtcctctgggatcgtgcggagacacccgatcatgccatgatttcgcttgcatcaccaagcgctgacgacctcggtcgttcgggtttgccgggcacggtcgataatcacttctggcagcgctttagcggggccatgctcttgagtgtcgtccaaggtgccttccaggcagcgagcacctacgctggcagctcgggcggagggatgagcttcaacagcttccagaataacggtgaacaaacggccgacacagccctcaaggccaccatcaacataccgccaaccctgaagaaaaatcagggcgatacggtctccatttttgtcgcacgggacctcgatttctcaggcgtataccagcttcatatgactggccgcgccgtgcatgggcgggatcgccgtccataacgaattcaacttttagattgcagacgaggtacgatacaaatggaggtggacccgcaattacgcatccttctcaagccgattttggaatggctcgatgacccgaggaccgaagaagtggcgataaatcgaccaggagaggcatttgtgcgccaggctggcgttttcaccaaatttcctttgtctgtctcctatgacgatctggaagacatcgctattttagcaggcgcgctgcgaaaacaggacgttggaccacgcaacccactttgcgccactgaacttccagatggcgagcggttgcaaatttgtttgccgccgacggtaccgtcgggcaccgtcagcttgacgattcgacggccaagcttccgtgtttctgggctcaaagaagtctcgtcccgttacgatgctccaaggtggaaccagtggcaaacacgaaaaatgcgccaagatcagcatgatgaagttatccttcggcactatgacaacggggatctggaagcgtttctgcatgcatgcgtcgttgggcggttgtcgatgttgctttgcggccctaccgggagcggcaagacaacgatgagcaagaccttgatcagcgctatcccgccgcaggaaaggctgatcaccatcgaagacacgctcgagctcgtcattccacacgagaaccacgtacggctgctttattcaaagaatggggctgggctgggcgcagtgaccgctgagcacctgcttcaggctagtctgcgcatgcgaccggaccgaatactgctcggcgagatgcgcgacgatgccgcgtgggcatatctgagtgaagtcgtctcagggcatccgggatcgatttccacaatacatggcgccaatcctgttcaaggtttcaaaaagctgttttcgctcgtgaaaagtagcgtgcaaggggccagcttggaagaccgcacgctgattgacatgctcgcaaccgcgatcgatgtcatcatacccttccgtgcctacgatgacgtttacgaggttggcgaaatctggcttgcggcagatgcgcgccggcgcggtgagacgatagctgatcttctcaaccaacagtagtttcagctactgtttaaaatatcatgggaatgttacaaaattacatttgtagcaaagctcagcaatctttgtcatcaagctgaaacatattgtttgcatttttgtcatgcacggcttagccggtattttgccgaagtgcccgtatagtgagaaaaaattgacgagtggggtctaacgcatacagcctttgcatgcatagattctgttaagctgcaaaggggtggccaggatcctagattgaaaggtgaaccgttgaaacacgttcttgtcatcgatgacgatgtcgctatgcggcatcttatagtcgagtatcttaccatccatgcctttaaggtgacggcggtagccgacagcaagcagttcaatcgtgtactttcctccgagacggtcgatgtcgcggttgtcgatcttaatttgggtcgcgaagatgggcttgaaattgttcgcactctggcgacaaaatccgatgttccaatgataatcattagcggtgatcggcttgaggaggcggacaaagttgttgcactcgagctgggagcaaccgattttatcgccaaaccttttgggacccgcgaatttctggcgcggatccgtgttgcgttgcgcgagcggcccagcgtcgcgcgtacgaaagaccgacgctcattttatttcgcagactggacactgaatatcaggcaacgccgtttgatttcggaagagggcggagagattaaactcacggcaggtgagtttaatcttcttgtcgccttcctggagaagccgcgcgacgttctatcccgcgagcagcttctgatcgccagtcgggtgagagaggaggaggtgtatgacagaagtattgacgtcctcattttacggctgcgccgaaagcttgagggggatccgacaagcccccagttgatcaagactgcaagaggtgctggctatttctttgacgcggacgtcaacgtttcctacgggggtatgatggcggcctgacgcagaggtgcatttcgccataagcagtctgttcctggcatcagctgatcgatatgtggcctgcaaagctgcctttcgtcgctcctatccgaacacagcagtgctgcgcagtgatcggataggccctctcttttgagggatcatcttttagttgtcttctccccagcaaagaaagatgcaagcgcggcggtagctagcttgtggccaaaagctcgggcagtctccaatcctaatggatcaaagtgattgcgagcgacttctagtagcggtaccgggaacatgcgggaggtctgaacgatgatggatttttcggaagctgtctgagggatcggataactcttcggagctgtgcgaaacgatccgtctgccagcatcttttcgaaatcgccaagcgcacggcgcaagatcatttgtagcgacttggaagggctgtattgaaggatcaggttgtcatagattttcgacacctgcggcgcgggcggccgcgctgaaaggaagacctggatcttttccggcgctgtcgtcgaactcagagcatccacggtaagcatcgattgccgatcagcactgggatgacgcttggcgacggccggggcaggtcgtcgatcttcctggtcgggattttctggcggctgcggtagggccgagttttgggtggcaacaggcaagtgagcctggaccatttcgggtcgagcggcggcaagccgcctggcctccccgacagacaaagcgggtttgcgaattcccatcttcacctctctaaggcttcgccaaccaatttggagatggtgacgagttcctccatcgcgatcctgagattccgttcgaggaggcgcatcgacggatcggttctcatattcagcaatgtgagatgcaacattccacgttccttcatcgcggcaaatgcgtctctctcgtgcatcggagattgcacaactggaaggcttgcgagcatgtctgacattgcacgctgcgatgtggtcagccgaccgaccgggacacgttggcgcaatacggctgtcggaattgccaagttctcgctcagcagcagctcaatgacatagcggtaggtcgacaatgcttcgtcgatatcgagcggagttaacatcgtcgggattagaagcaggtttgagctggcaatgatcgtgttgttgagctcgctcgaaccgccatgcgtatcggccagcgcatagtcaaatccctggagctcggcatcctcataggccgcctcaaggagtgacatttcctcggcggcataaacttcgcagaatgagtcccaggtattgctgcgtagggcgttttctttccatcgcgttagtggtcggttttcatcggcgtcgaagagagccactcgacgaccgtcacttgcaagagcggcgcaaaggcccatgagtgccgtggttttgccggcacctcccttgaaggagcaaaatgtcagaagtttcatatccttatcctgctagtgttgtgaaatggaagtgcgtctgtatttttgtttgtgtgtatgattttgcgattattcatgaataagaaaataattatctgaactatatttcattgttgttatagaatagttgcaaatgtaacaattatagaggaaataatccttatctgttcttgattccagtttttataggcgtaggttttcgtctgccccgatgggaaagttctgcgacggggcaatttagatcattcgctcttctatggagggagctatgtcgcaaggcagtaagcccacctcaagtgatattgccatcaaccagcgcgtaggcgccacggttgaaggtttcagggtcgtgagtacacggttgcgatcggccgaatatgaaagtttctctcaccaggcacgcttgctggggctctccgacagcatggccatccgagttgcggtgcgccgcattggcggctttctcgaaatcgatgcagagacacgtcacaaaatggaagccatacttctgtccataggaacgctctcaagcaacattgccgcgctgctatctgcctatgctgaaaatccgacaatggatttggaggctctgcgagccgaacggatcgctttcggtgaatcgttcgctgacctcgatggcttgcttcgttccattttatccgtatcacgccgacggatcgacggttgctccatgctgaaagactccttgtagcgctgccgtagcacatggcggggaagatgttggatgcccgatcgagctcaagttatcattcgcattgtaccgggaggcgggaccaagacccttcaacagattatcaatcagttggaatatctatcccggaagggcaagctggagctgcagcgttcggctcggcatctcgatattccccttccaccggatcaaatccacgagctcgcccgaagctgggttcaagagactggaacttatgacgaaagtcagccagacgaggaaaggcagcaggagttgaccacccatattattgtaagcttcccagcgggtaccagccaggcggcagcttatgcggcgagtcgggagtgggctgccgagatgtttgggtcaggcgcagggggtggcagctacaactatcttacagccttccacatcgatcgcgatcacccacacctgcatgtcgtcgtcaatcgtcgcgaacttttgggacacggctggctgaagatatctcggcgccacccacaactgaattacgacgccttgcgcatcaatatggctgagatttcgcttcgccacggcattgtccttgatgcgagctcgcgagcggaacgtggtatctttgagcggccgatcacctatgcccaatttcggcgccttgagcggcaggctcgccaaatccgtttcgaagacgccgatttggaacagtcgtcatcgcaaggagatcacccagaattcagccaatcgcccgacacagccccatttgaagcatccgcgggccgatcggagggcatgccttaccccaacaatcggcagaacgggtcgcaagttcatctccacgagccagccggattcagcaacagagccggtggcagcgtacggattgcattggagacacagcgccttgccattttcgcggacgacatagagagcggctctccgcctgtttccgatgttcgcgccggcaacgcaaacgccgattccgatcttcctcgctcaactgtcgcgcgcacgacagactacagccagcggtggtcaaaacgtccccgtgacgacgacgaagggccgagtggcgcaaaacgtgtgagattggaaggtatggcagttgggcccgaggcgaacgccggcgaacgagatagccgtggtgatcccgtcgcaccgccggccgaaacgtctcggccgtcttcattgcaggacatggcgcggcccaacaccgcgaccgatccattggctgcttcaggccaccttgagcaacggagaggcactctttcaaagcgtccgcgtgtagaagatgatggagaaccgagcgaacgcaaacgcgcgagagatgatcgcagccaggacgggcgcgggggaaatagaagatagagaaggaccgagtcatggcaaatgaagagttcaccggacactttgcgcgtcccgctcctgtggcgaatgacgaagggcgccggaccacatcgacctccattcccgcacacgcaatggctgctcgggaagatggccgggacacttctgtcgcagtgactttgtcgcgtccaccaaattcaggcatcccgcacggcatcccagaaacatcggcgagcggccgacggcttgtagcggctcatccgcaggatgccgcaatgccgctagggttatccgaaacccgcacggatctacctgcaattttgcggaagaataacggcgatttccgcaccgccatgcagcactggcgtgagcttctacacgaaaatcccgataagcgcgacagggaagccagtgcgttgccagatttaggagcaaggggcataaagcgaccgcgcgaaatcgagcatcccggcgatgcaaatagatcagtcacacgacgggaaatcggcttaggcagagagatcgatacggtcgcggcatcttcgctcgtgaaccgtgatacatgggtcgcgcattcgtcgaacgggcaaggcgggccgcaagcgggcgtgtacaatgtccagccatcggcagacagagcacaggagacctcgcaggaaagctcgacgttacccgaccccacctctgtttccgctctctattcgggtccaccctcagaatgggtcgggagagataccggttacgagaccgatagaaattcgggtgacaccatctcggcgccgatccgagggctagaggaactcgaagattcagcggacagccggtactttggccacgaagctcagagtctatcagcgaacgtgacaacgtcaatttcgaatgctgaagcaagttctcatagcgaacacactgaaattctcgacgatgtcagcagtgcccgctcgggcgaacaggggaggggtggcgatggcggagcaatccttgggttctctcatgacctttcaccgcatccgcagaggttaccacaaacaacccccgatgacttccccgagttgaccaacgccgccatggcagaaatcgatgcgatattcgaatctctctcccagaagtccctggcgagggagagcgccgcaccggtcttgcatgagcccgtatcaggggacgctttccagaaagaaggtacttccgacagggctgatggcatgccctctaacggggagccacccgttgagcaggctggcggacatttaccgcaagcgctgaggtcctcgggagcggagctcgatgatttctcttggttgaccgacgccgcgctggcagaaatcgatgcactgatcaaatctcattccaatagatcctcatcggtgcggaatgccgcaccggatttgcgcggcgcgggattagacaacgccgttgggaaagacagcgttatcgaacacgcagagaagatctcgatcgatagtccgaggcctgccagattgaatggtgagcgttcaccgaaggcacagaagtcatcgcaagcaagccttgcggattttcccgatctaactgacgccgaatgggcacatatagaagaaacggagcggatcgcaataaccgctattgaaaaggggaagcaaaaaatctcgaccaaagccgatacgcggtctggtttcggcaactcttctgtaccccaggttggcaaccgatcaggtgctccgatggttcccaataccaatcagccaattccatcgtggtaccacaaggcagagaatatttctaacggcttggtagaggacactcacatcacgccggccgttgtgagttctaggaggcgaaatgacgccgaaaacgcctctaccaggtttggtgaccctgctcctgctttgaggcattacaatcttggtagaactctcgaggcgacgcccgttcgtgacgtgatatctggcaccagcagggaccgagggctgaccgctcatgcggcagatcaattggcaatagacgacagtcggaaacggactgaccgtgatcgcaagacacagccttatataaggggactggattcgcgttcacgtgaaggttacgggcggtaaatgctggattgtttgcggcaacacccaaatccaacgcgcgatttgcgatcgatcgaagaatctcggtgaagtgatgaattcgagcaagattacgccccagcgtttagctctcagcatcgtatgttcgctagcggccggtttttgtgcggcaagtctctatgcaacattccgccatggtttcaatggcgaagcgatgatgacgtttagcgtcttcgccttttggtacgagaccccgctctatatcggtcatgcgacccccgtcttcttttgcggcttatccattatcatcgcgacatctgtggttgtgctgttaagccaacttatcatatcgctgcgtaaccgcgagcatcatggcacggctcgttgggcggcatttggcgaaatgcggcacgccggttacctgcagcgttataatcgtatcaaggggcctgtctttgggaagacctgtggccctctttggttcggcaactatctgaccaatggtgagcagcctcacagtcttgttgtcgcgccaacacgtgccggtaaaggcgttggcgtcgttattccgacactcctaaccttcaagggtacggtgatagccctcgacgtcaaaggcgagctttttgagctgacgtccagagcccgcaaatcgagcggcgacgccgttttcaagttctcacctctggatccagagcgacgaactcattgttacaatcccgtcctcgatattgcagctttaccgcccgagcggcagttcaccgagactcgccgcctcgccgcgaacctgatcaccgccaaaggcaagggtgcggaaggcttcatcgacggtgcacgggacctttttgttgcgggcatccttacctgtattgagcgtggtacgccaacgattggtgcggtctacgacctatttgcccaacctggagagaagtacaaactttttgcgcacctcgcggaagaaagccgaaataaagaggctcagcgcattttcgataatatggcgggcaacgacacgaaaattttgacctcctatacgtcggtgctcggcgatggtggacttaacctatgggctgatccactcgtcaaagcagccacaagtcgatcggatttttccgtctatgatctgcgtcgaaagaggacctgcgtttatctttgtgtcagccccaatgaccttgaggtcgtggcgccattgatgcgcctcctttttcagcaggtcgtgtcgattctgcagcgatcactgccgggtaaagatgagcggtatgaagttttatttctcctcgacgaatttaaacacctgggcaaactggaggcgatcgagaccgcgattacaaccatcgctggttacaaaggtcgcttcatgtttattattcagagtctctcggccttgtcgggcacctatgacgaggcaggcaaacaaaactttctcagcaacactggcgtgcaagtgtttatggccaccgctgacgacgaaacgccgacctatatctcaaaagctatcggcgaatataccttccaggcgcgttcgacctcatacagtcaagcccgtatgttcgatcataacatccagatttccgatcagggagcaccgcttttgcgcccggaacaagtgcgcctgctcgatgataaaagtgaaatcgtccttattaaggggcagccgcctctcaaattgagaaaggtgcgatattattcagatcgtatgctgaggcgccttttcgaatgccaaattggcgccctccctgagcccgcatctttgatgcttgcgcaagatgtccatcaggatgggcaagatcatctcagtcaacaagctgcggtcacggcggcgctgggcttaggtgacatcgattctctagtgaacaacggggaaactcctacacagcaaaacagtgatatgaatgacgaacaggataaccttgcaattggaatatacgccccccaggtctcggttgaaatcgatgacgttgtggaagacgccaatgcccgtggtgtggcgccagtttccagtgttcccgctgaaatggctccagctctgagtgcacaacagcagctgctggggcagatcattgcgcttcagcaacgatatagacctgtgtcctcaaatcccatcgaataatttgaggctgtttttaacattgggaccattcgatggacggagtcgtcacctgttgcggttctatcgaatgcggcgctagtctccgaggttgccgattgagcagatatcgccatgaaaccgtcaggaaacccgaaagtcgaccttagcggttcggctacatcgcttcccgaagttcccgccggagctacccctgtcctttatccaatcgagccccggagccgtcgggctgatgactcgtttgaggatcaaatcgctcacggcgaatatacatctgcgtcatttgatcatgatggagtgaagcttggtgcagcggaacgggaagcgttcgagaagtggggtggatcgggccggcccacatggaaagacctggtagttaaggcgcgccttgatgcaatcgacagttccgcttggctctccgattttgacgaggactccccttcgaccttcagatatgaagggattcctttgggtgaggctgaacggcaagcctacaaaaaatggcaaggagacgctcagccgacgcgggacgacctgattgtcaacgcacgcttggcagaactcggccagtctggctggattgttgacgagtatgtatcccatgaagacgtcgaggattttcgctctgattcgttgaaacgcaagcggagcaactcagccgaccgggacgagaatccccccgcatcttttcggcatgacgggatgaggctcggggagcccgagcgcgcagcacatgataactggtgcgagccggagccacctacgtggaaagacctgatactcaaggcgcgccttgatgcaatcgacagctccgcctggctcccccaattgaacgaggattccccttcgaccttcagatatgaagggattccattgggtgagggggaactgcaagcctatgaaaaatggcaaggagatgcccagcccacttgggaacacattgttgttaatgcacgcttggcagagctcggccatgctttttggattgcagatgaacataatgcccttgaagaagccgtagagtctcggtctgatgcatcgaaacacaacctggaacgtcccgtcgatcaggaagcgggttcttctgcgtcctttacctatgatggcatgaggctcggggcacccgagtacgctgcgcataagcgctggagcaagccgaagcggccgacctgggaagatctcatcctagatgcacgccaggctgctatagaaagcgcctcggtttcgagtctgcagattggaaaggaaccatcgtcagtctttttatatgagggaaagtcgcttggagatgcggaacgtcaggctcacggaaggtggaggcagctagcccaaccgcgatggcaaaatctggtggtgaatgcgcgtctggcagagctcgacccgtcggtctggattcccgatgagcatgatccgtttgaggaaggcgaggtgcctactcccgccccgcaagcgagtacagccagtaaatccaaccccactttgggtggtcaatctgaatcaggccggcccgaccgtgcacatgagacacaagagacgactcacctgcaatcgccgacacgctcacaattggaaacaaggcgcgcactatatttcgggtcccctggccgggatgcaattcaaacggagagcatagccaactgtgatcgttccgatggcgcgggcaaagttaagcggttgggcaccaaaggccgccgagccgttaacccaattactcacggcgtaaattccagtgtgcaagggccgttgtccgatgaacgtgggcatgaggctccgttctcatcgtcagagcaagttgtccgctcgagaggcgataacattggcacctatggaagtcggaaaaacgaacgagcgcggctggctacggagaccgggaaatacgaatcggagcacattttcggattcaaggtcgtacatgatactttgcgggcgacaaaggaaggccgtcgtctcgaaaggccaatgccggcctacctcgaatgtaaggagcttcataggcaacacgtagggactggaaggggacggacccgacttgtcgggcgtggatggccagatgatgcgagctatcgctcagatcaaaagggaaccctgtcggaccctgtcgcgtccgcggaaggtgtgacagcctcaaatggctaccagttgaaccagctgggctacgcgcatcagctcgccaacgatggtctgcaaagtgaatcgcccgatgggctcaccatgccaattcaagtcgcgacaaccagctacaactataccgtgagccgcgatccagtcctttcaccacccagtaaagaacaagcgtcccaattgctacaccttggacctcgcgggcaaacggaagctgtgcttgcccgcgagacagcattgaccgggaaatggccaactctcgagcgtgagcgtcaagtgtatcagcagtttttggccctgtacgaaatcaaacaggatctggacgccaaacaacttggtgtacggcagaaaaaacagtctctcgctgccgcgttggaccggacagccgctttgataggcgcgtcaccttcgaaagctcaatcgcaggcagcggagggagccaacggcgccgaaccacccgaggaacgacgcgtctatgaccagcgagatcgaagccgcgacaatgcattcaaccgctgacaaagttgttaaagatgatgatcgatggtgtactccgcgtcgacccctggaaagtttgaagcccccccgcaggcccgccacgaattgcagttgaaacacgatattcgttcaacgcatttcgctgaggtgctaggcttcgcgtattcttgatccgcatttggagtgtgatttatgctcgaagacggccagaaagcacatgaacacgagccctcggtccctcatggtgaggagactgcagtttccctgccgaatgacctgttggtggaggttgccaaacatctaccgaccgacgatccagttgaaacggcaagtaatctcacaagctttaaacttgcgagccacgcggttcgggcatcggtcgatgccagcgaagtcggaacgtttcagcggggcgtgaatcgacttggtgcttcaagcaaggcactctatgattatgcagtacctgggaatggctttgccgagtatccgaactatccggagccggatccgactggcgagtttgcgctggcaagccagcggatcagcgctattggcccaactttgaagtttcagtcgtctgccaggaaaaccgagattgtcaatcacattctcaatatgtcggacggcggtgagcaagcggaggcgattatgtcgataacgtcccatttgcagggccttgggagggccgaccaagggcggcttatcaatagagcaattgaatacttcacggaagacgggccaatcaactacgacagtcgccattatgcagtctatgcacttgcagcggcgcacgaccatttggaagttgaacataaggcacgaatcttcgacgcaattgcgaagcgaccggaacttgcgagcctctacgccgaggaacgagagcattcgcaggagcattcggctcttgcatccagatccgaaagtccacgcgagcgaggtggcgataatttggccggcaacctcgcggagatcgaagaaaaaatccgcgcagggttaactctcggaacgctcagcgctcacgaacaaatggaaagagcggaaccgatcgcgggttcgattgagacggcgtacgacgatgcgcgcgcgaatctaatcggttcgacgagggaccgggcaagatctgatgcaagtcgatagcttcaggtctggctgaatattcgaattttcctggaaaagcgcgcctgatttggcggcggtattttattctccacaaggaccaacaaagcatacgcaggaaaggcctacgtcatggtcagtataaataagaaaagtttgaaggaatctcctacagctaacacgcgccattctgatgaacgcctcgttgatcagttgggacaggcctatcttgcagaacgcgaagcagggcagaggcgcgcgcgatttgaagcgccggaggcgttgaaaaaatatgcctccaaactgcaagtccttgataagctcgatgcggatttccgtggcgcgatcgccaacaggcccttcggaagtgaacaactgcggatcgataacccgggagagctgacccaccagcgcggcatgttgaggaagacgaagaaagtcttcgttcgagaccaaacaacaggcactctccggctcagtcactacgagaggtctggctggactcatattcgtcgctatcactacgaccaacgcggcatgctgagcgaaaagcatgtcaaaagcaaaggcggtgacttcgaagaaaaatgggaacgggatgaaaacggcgagctgatgcgtacacggtatgtcgatcggcgcacacttgcgggacgggcattgaatcccatttccgaggagataggcactccttatgagagtggcccggatgacaggctttatcgcgttttaaggcgtcgggagggctctcagcaagatactttcgagcgcgatgacaagggtaatctggagctcattgcgagcaaacggaccggcttttcgatgtcctcgcaaaagtcggcggatcggcaaacatctgaaacaagcattcacaagcttggcgcagcttttagtaaatcatatagatcccggctggataaggacggcaacgagttaggtcgtgatgtctccacacatcgaagactgctcaacaagcggtcagccgtctacgatgaggccaccggcgagctcaagcgcagcaagcacacttttagcaagatatacaaggcggaaacaacatacctgaacgcggatatcaaagaggtctccaagaaaatcctgggcgtcacggtcggcaaaagattgaagacgttaagcgaacgcgaacttgaggctcaaaggttacgtgccgcggaacgttccctccataaacaggcctggcagaatcctccagttaatccctcccggtcacaacgggagactgcgaacgatcatcttggtaacgtactccatcagcgggtagaaccggaggtgacggtcgcgcgtcaagttggatctgtgtccgtcggtgaggatcgccacgctcttgaagccgctcgatcgacgttgaatgaactgcgcaactctcaaccgtcgaatgatagggcaaacttgagttcgccgagagccgaaatttgcgaccgttcaacgaaccgggatcgcaccatgtcaggtgctttatcgcgataatgagcttggtggaacatacgtcgaactattgggcggttccgatgcatgcaagaccgtaccagccatcattttctcacagcatcaatggttcgtgctacagcgattcatgggaaacccgttccatgtccgaaattagctgcaaccaggagtctattgtcttgattgtctcgtcgaagtccacctgccgtgtcgtgcggcccggcagcagcacctacaccggcaaacaaggcctcagctattttgaagggatagcggccgagacagtgggctcgaccgggatttgcatgcatcttctgacggttccgccgggcgctcgcgccaaggcgcatcttcacgcctcgcatgaaacggcgatctacgcgatttccggcgagacgcattgctggttcggggatgaactggaagagcacgtcatcgtgcgcgaaggcgagatgctctatattccggccggcgtcccgcatcttccagcgaaccttagcgaccggccggcgacagcggtcatcgcccgcaccgatccgaatgagcaggaaagcgtggtcctgctgccggaactggagcgggatacctcatagctttggagtggcgattacagcccggcgatggtagactgggtcgctgcatcacgaaaaatattgccgtcgcgaccaaatctctgcgtattgcgttgatgccggacgaagatttcaaaaccgaagccggataacgccgttgggattttgatcggggtcccgccccggttaattaccggaatccgcagaaatctcaatatctctatgaaaacgtgcaggaacccattctgcgcgtgatcgatatcgatcatagctccatcgatttgcgcaacgcaatatcgatttgatgccccgcacaaactaattatctgggcattctgcttatttttctgtcatacgactgtcatctatggacgatagatatcgatcattcgtgatcgatataagtcattttgatgacaggaggcgtgccggtgctaacccaggcggaagatcgtcaagcaaaaatcgtcgagttgttgcggacgcgcaatttcgtcgacatccgcacgctcacggaacactttgatatttcagtcgcgactgtgcgtcgcgaccttggcgaactagaggcagccggccttgcacgcagaacgcacggtggggccgtcaacaccaatcaggtcgcgctggacaagtcgaatgcagctcgtgccgtctggaagcagtccgagaaggccgccatcgctaccgtcgtttcgggaatgattgtcgatggcgacacagtactcctcgacgccggaaccaccgcgctggaagttgcgaaaaaactcattgggcgcaggaaccttacgctcatttcgaacggactcgacatcgttgccgaattgacgcgcgacgaagcgcacagcatctactcggtcggcggtgaatataccgacacgaaccgatccttccgggggccgctggcggagcaatttattcgccagttcaacgtcgacaagctcattctcaatgctgcctcgatcgacgtcgaccgcggactgatctgcacatcgacaccggtaaacgcgagcgtcgctcgcaccatgatcgaagtgtctcgccgagtgatcgtcgtggcggatcactcgaagttcacaaaatccagcctgtcggttactgccaagatcgaggacatcggcgtcgtcgtgaccgacgccggcgcgaagtccatcatcgacgccgcccccgaaaagctgcgcaagaagttcgtcatcgcgaactgaagaccttctatttccatcaacagcctctcgatagcaggagattacagatgctcaagaccaaccgcagaaagtttatgatcggtgcgagcgtcgcggcgctggcatcgacgaccagcatgaagttcgccttcgcagcggagcgccgtgcgcttcggatcggcgtgaacgggcttccctctacactggagcctgtcaacgccatcagcaatgtggggccgcgtatcgtcaatcagattttcgacacgctgatcgcgcgtggcttcttcgaagacggcgcgccaggcaacggcctcggcttggtcccggcacttgcagagagttggaaacgcatcgacgataagtctgtccgcttcaggctgcgtcagaaagtcatgttccacaacggcgtcgagatgacggcagacgacgtcgcatacacgttctcttcggagcgcctgtggggtcctgaagcgatcaagacaatcccgctcggcgcatcctactctctcgaattcgatgagcccgtcgttgaagataagtatacggtcgtattgcggacgaagaccccaagctatctcatcgagacctatgtaacctcctggatgggccgcatcgttcccaaggattattacaagagcctcgggacggtcggattcggtaacaagccgatcggcacgggcccgtacaagttcgtcgaactcgttgccggcgatcgtgtagtcgtcgaagccaacgacgactattggggtgtcaagccgacggcatcgaaaatcacttaccagctcgtcgccgagccggccactcgcgtcgccggattgatcagtggcgaatacgatatcgtcacgacgctgacacctgacgacatggaactgatcaacggttaccctgacctggaaacgcgtggaaatgttgtcgaaaatttccacatgttcaccttcaacatgaaccagcctgttttcaagtcgaagaccctgcgtcgggcgctcgctcttgcggtcaatcgtccgatcatggtcgagtctctctggaagaacaaggcgacaatcccgaatggcttcaacttcccgaactacggcaagaccttcgatccgaaccgtcgcgcgttgcaatacaatatcgaagaagccaagcgcctggtgaaggagagcggctacgacggctcgccgatcacctatcacacgatgggcaactattacgcaaacgccactcccgcattgatgatgatgatcgagatgtggaagcagatcggcgtcacggtggtgccgaaggtcttcgcgccgggcgcggctccgaaggaccaggacagctatattaggaactggtccaacggtcagtggatgacggacgcctgggccacgatgatctgcgagttcggcccgaatggccaggtccagaagcgttggggctggaaggcgccggcggaatttaatgaactatgcgtgaaggtatcgcaaatgcccaacggcaacgagcgcttcgacgccttcaatcgcatacgcgacctcttcgaggaagaagcgcccgccgtcattctataccagccgttcgacgtctacgcagcccgcaaggacgttcactggaagccgatcagcttcgagatgatggaattccgaaacaacctcagcttctcataaccacacctttgcgcatcggcggtgcgcatccgtgcgcaccgctcaaggggagagcccatgtctaagctattgaccgttcgtaacctcgttgtcgaggtcccggtacgaaacataaagatcatcgacgacatcagcttctctctggaggccggacagacgctcggtcttgtcggcgaatccggttgcggcaaaagcatgacctgttatgccgttgccgatatgctcccgcgcggtatcgcccgcacaagcggcagcatcgtgtttgaacgcgacgcggccagaagtaggaaggcagccgacccgacaatcgcgatgatcttccaggatccgaccagcagtctcaatcctctccatacgattggacactatctggagtcggctctctaccgccatcaaggcctgaggggcaacgacgcacggctcgaggccatgcggcttttggaacgtgtcggtatcgatcgcgcgaagagccggatgcgctcctatccacaccagttctcgggtgggatgaaccagcgcgtgatgattgctcacgcgcttgcggcaaaaccgcaattgctcattgccgacgaaccgacgaccgcactcgacgtcacgatgcaggcacagatccttcatctccttgaagaactgaaagcagaaaccggcatggccttgatgattgtgtcacacgatctcggcgttatcgcccggctggccgacacggcagcggtcatgtattgtgggaagatcgtagaaacagcgcccgtagccgagttacttcagcgacctgctcatccctacgctcgcgcgctaatcgactgtatgccaagcatcgatcccgaggatctacaacctccgatccccattccaggttccgttccgctgctcgatagcctccccgagggctgtcattttcatccgcgctgttttcgcgcgagcggcgagtgctcagcccgctttccagctcctgctaatatcggccttgtccatgaggcttcctgctatcatccggtggtcgcatgagcgcgccccttctccaagcacgtgacctgaccaaggccttccgtcacaaaaccggctttttgtccaaagccacaaatcaactcgccgtcaacgccgtaagcttggagctcgcccctagggagcggataggcatcgttggcgagtcgggaagtggcaagtcgactttaggccggctactgctgggcctcactccgcctacaatcggtgacgtctggtttgagggcgccaaccacaaggatcgaaatgctcaggattggagtcaattccgtgtccgaacatccctcgtgcagcagaatccactttctgcccttaatccgcagatgacggtcggccagcaggttgctgaaggcttgttggtgcatcacgtcgctggtcgcaccgatgcttatcagcgtgcggcagcaatgcttgagcgcgtcgggctgtccggagctatgatgaaccgctatccacatcagatgtcgggtgggcaacgacagcgcgtggttatcgcccgcgcgctaatcctcgacccgaggctggtagtgtttgacgaggcggtgtccgcactcgacgtgtcagtgcaggctcaggtcgtagcgctcttacgtacgctctggaatgaactcgacctcgcatatgtgtttatcacccacgacctacggatcgtgcgccatctcgttgaccgtatcgccgtcatgtatctcggccgtatcgtcgaaacgggcaacatcagatccgtttacgagtggccgcggcacccatacacgcgcgcgcttctcgcttccgttccgaccatggacccgacggtccgtaacgtcgagccgccgatcaagggagagcttgatgccgcgaaggtgtcgcaaggctgtgctttccggtcgcgctgtccattcgccatcggccgatgcgagtccgaaacgcccaatctcagatcgatcggtcaacagcaggctgcatgccatcgggcggaagaattccccaagtcaatcacttcattgatcgatttaggacaacagaaggaaatggcctgatgatgggattcatccttgctcgcatggtccgtgctattgttgtgctcgtctttacagtcacgctcgtcttcgtcgttcttcgcttgagcggtgatcccgcccaacagatgttgtcatcgcaggcaggtcccgaggcgttggccgcgtttcggacgaagtggggtttcgatcggtcgattattgaacagtacctaatttatatcgccagtgcatttcgaggcgacttcggcatctcatatgccgatggccgcgacgtctttacggtcatcggcgaacgcataccaaagacgcttgccgtgacggtctcggccttcatattgagcttgctgatcggagtgccggtcggaatccttgcggcagtgcgccgtgagtctgccgttgacaagggcgtcatggctggcgctgtgctcggctacagcattcccaacttcctgctcggcctgatcttcatcttcgttttcgccgtctggcttcgggtactgccgagttccggcagttcgacctggtaccatgcgatcctgccaattgcgacctttgccctctacaatgctgccgtcgtcgcgcgcttcatgcgctcgacactgatcgacgtacttgggcaaccctacatcgctgccgcacgcgcggacggaattccgaactgggagatcatcctccgtcacgcgcttccgaatgcggcgattccgatggtgaccacgatcggcttcatcgccgggggcctactcggcggctccgcgctcatcgagcctgtcttcgcctggccgggtattggaagtggcttcgtgactgccacgagcaccggcgacctctctgtcgtacaggcaacaatcgtgttgttcaccgccttcatggttacgatcaatctgaccgtcgacgtcctctatgcggtcctcaatccgaaaatcaggaaacagtgacatggcgacagcgacatcatcccgctcgtttctggccacgatatcggcgccattctcaagcatgccggccagtattgtcctgtgctgcacatggatcgctatcgtcgcaatcatcggcctgacggctcgatggtcggcgccttttgactatctaaaccaggatccgcttgcacgttttacgcggccgttcttatcggcaagtcatctgctaggaaccgactatttggggcgagacgtcgtcagcaacctcttggtcgcaacgcagacgacgttgacgattgctttggttggttccgttatttgcgcgctgcttggaacaagcctcggttttcttgccgcccacttcggcggttgggtggacaatgcgatcatgagtatcgccgacgcgatggcatcggtgcccttcatcattatagcactcggtgtcttggcggtcttcggctcaagcccactgctgtttgtgttcctggtgggggttttcaactggtggcgatatacgcgtctgacgcgagcattggtcatcagtgccaatgaagaaggttatgcagaggctgcccgcattgtcggtgttccgcctctgcgcctctatctgcgccacgtgctgccgaacatagcaggcccgctcatcgtccagttcaccgtcaacttcccagagatcattctcttggaaagcggcctgagtttccttggactcggtatccagccgccggcgacaagccttggtctaatggtcgctgacggccggaattatctggcgattgcctggtggctggcgaccttcccgggcgcggtcattgtccttacgaccctctccatcagcttgctcggcgactacttgcgcgaccgtctcgacgcgcgcctccgttgaatgaaaggaaagaaaatgaacccactcagaatgacgaaagagacgatacgtctcggcggccaccgcggccatagcaccggcgcgccggaaaataccctcgccgcgtttcggaaggcatttgaatacgccggcccaaaagtcacttgcgaaaccgacctctccatcactgccgacggtgagctcattttgatgcacgacaagaccgtcgaccgcacgaccaacggtcgcggcattgcgcaaaagatgacctattccgaaatctccaagctcgatgccgggtcttggttcagcgacgaattcgcaggagaacacgtcccacggctcagagatgcgctacagctcgcccgcgagttaggtattatctatcagcttgagctcaagatctacgataggaacgacgtcttcttcccgaagctgcggtcgctgatcgacgagctgagctgcgcggatcttctgcagttctcttcgttcgactacgtccagctgaaggccgtaaaggccgcgatccctgaagtgccgactgtcggcctgatgcactcccgtctgatcgatcccgccgccattgcccggcaggccaaccttgatgccatgaatatcgagatctaccactttgccagcggagaggcgcgccaacttcatgaagagggcttcgctgcattctgctacttgccagcagggcatcatgaaaagctgatgcaacacggcgtcgatgttgaggctcaggtggttcaatgggttcgcgagggtcagttggatcaacttctcggcgacgacgtcacgcaggtggcaaggctcagggatgaagcccgtggctgatattcatgcttctacctcgtcagcccgctctgtcgaggccatcgttgaagacatcgcaagggaggccgggaagctggctctgacccatttccgatcgttggaaaaccttccggtcgagaggaagggtcatctcgacctggtaactgaggctgacaaacaggtcgagaaattcttgatcgcccggttgcgggactgctttccggacgacggcatctttggtgaagaaggtggcgaaatccccggcacttcaggtcgtatttgggttgtcgatccgatcgacgggacgttcaatttcgttcgaggcagccagaactgggcgatttccatcggtctctacgagaatcgccgcccagctttcggggtaatccatgctccggtccgggacatgactcttgtcggcggtaaaacggtcccggcgcggctcaacggcaaaccaatcaagcctctgccggccctcgacatgtcacgggcttcgacgggatttagcttccatccctcggtatctacggatgaccggcttgaggttatacgcttcatctcggacgacttgggcatcagcttccgtttctgcggggcagccacgatttcgttgatcgaggtcgcaatgggggaaacggacggctacgtgtcggtcggagactccacctgggatgtcatggctgcgctacccatcctcgccagtctcggtgtttctgacactatcgactgggaccggatcgaactgccgcagaagctccgtttcgcatgtgggagcgaagacttcctaagcaaagtcaggccgttgctgcagaacctgtcagctgctgcctgaccaaatggtagggccaaaagaagcgtgtagtgccaaatgctactcggctcagctggctcccataaaatcaaggcgccgcgccggcaactgtcgcgacgccacgttgaacctggatccgatggcgcatgcttttcgcgccgagttttaggagattatccttgaacccgtcagacccatcgctcacttcgcaacgtcctttaaacgccgtctatgacttcgtgtgaagggaagcggtggtcgtgtcgaacgactaaggcggcgaaaagtttctggcttcccctctctcgccacgcaaaagctggcaaagggcgaagccggggccagtccggcggcatccgtcgcggacggcctcacggacgacttggcggcgaccgactgcgaaatagcggcatttaaagctgaaagaatggctcgcctcgcagatacccgtcgaattgccgtccaccgatcaaacgagagctttaaaatgaatatggacctgctgagacgtactccggacctgcgcgctgtcgcagacgttcgccttatgacctcggaagatggcccaggacgaggacagcggatccttgtggccagagacgcggctggcattgcctttgaaatcgcggtcgaccgtggcttcgacatttcaagcctatcgttcaagggcctgaacatcgggtggcattcgcccacgcagatggcgtttccgtcccatgatcccgactcggaagacgacggccacgcatgcttaacattgcttgccgtcaaactattactgagacggctcttaagctcttcggggcatcacctggatcggctgcggaccagccggactgaaagtccgaagacaaggtcaccggcatttcaaagcgtcgctgcccgagctcaagcgtatcaatattcgtgccctctcgcgcggttccccaatcatgacccgaggtggcttcttgatggaaggcaaggtgcgtaatgtctgtcgagaactacaaggactgcaagccggcaaagctgacgccaaccgaaaagcaatatgccgcgctgtgtttcaggcacgttgcgggttcggaggatcctgtccaactgctgctgatcaccagtcgtgataccggccgttgggttatcccgaaaggatggggtgacgctaagaggaagccgcatgagaccgcccagcgcgaagcttgggaagaggcaggggctataggccgagtccgcaagaaaccctttggctattttacctatttgaagaagcttgacgacaaccggagcgtcatggttgtggtccgggtgcatctgctccatgtgcttcatctcgaggaagaatttcctgagaaagggcagaggatattgcgttggttttcgccgaccgcggcagcggctgctgtacgcgagccggatctgaagtttctgattggcggacttcgcgacgttgctctgcagctgctaagcgcaatgccgagcgtctggtagttgttgttcgaagaaggcttgatgccaccgcaactaacgtgtgccaccgttcgcgtccatcaataatcacgacactgtcgtccgagagccgttagacattttcaacggcgacatcgcgtgtcgtcagttcggcgcagcgtgcgatgcgagcacggatcgtggcgaataccaacgccaaccgggcacctttagccctaaacgaaaaattatcatcgcaccaaatagtaacgtttcgagcagtaggcgctgagccaaaccaaggccggtggcggtaaacacccatatgagcgtgagttttcaagcggtccgcaccgcgatggtacagcattgtctaggcaaaaagacccggcagggataccgggtcttccactgtttgaccggcgattagccgatcgatgaaagaagcctgacgaactggaaaatcagacttctcttacccggtggggccgggtatttcgagattagaagctgcgatggacccggagcacgccagcccactgatcttgcttgacagagtcaaaattcgcgtaggagagggatggctcaatcaacaggttcttgaccgggctccatttgacattcgtgcttgcggcgaagatcttggtgtcggaataggcaagctggaggttccacttcagcttgtcgttgatcggaaccccaacgccgccccagacagcccaatcgcccatgccgcaaagatcgccacggccagtcgggcaagcggtagtgtcgagattcgagccggcatactggttcagcttcttgccgtccgtgttccaggcacccatcaagaaggctgtgaaggcgccgaagtcagcatcgacacgagccttgatagcgccttcttcggcaatcgagtcgtaaccaccgacaaccttgaatccgaagttgccaactctgtaaccagcaccggcaacaacattcggagcgtagtggttagctttcgccttaacccaggcaccgccgtaggtagatgaatccgagccggaattggagtcttcgagtgagaccacggccgcgaagccgttgcctgcgtcgtagttgtaggtcaactggttgagttcggacgggccgtagtagatctcgtcatcgtagaaaacgtcgccggcgtaaccggtgtagaagtcgtaggccgagtccttcttgccgagagtgaagccaccaagattgatgtaggaccacactaggttggtggcagtagcaccgccgtcgttccagtcccaacgaacaatggcttcggtctgtagcggaccgtattcggtatcgcttgcggtgtcgagctgaaggtgcgcacgggtgtgccatttggtgccgagggcagcggtcggactgtagccattgtgccagacaccttccgaccgaacatagccgctaatcttaaggcaggtctcgctgcccgggatgaagaagtagccagctccataggcatcacagatgcggacatattcaagcggctccggttgggcagcaacgactgcatcagcagcatgcacgctcgaaacggcaccgaatgccgtagctgaactcaataatagctttgtaagcttcacgtgaatttaccccctagaaatgtggaaaagcgttagcaattccgctgaacaaaataagttgaacagcttcaagcggagggaaactcacgaaagggacgctactgtgcaagtgatgaatagaaatcaatcgccgtagacgatacgttatttacggatcaagccgctctatacacgagctcgatttaatatcggcgaaactgccacaccaaccgcatgattgttacctacacgtcacacaacttgtacctaattagcgggcgtataataaggttgatctatagtctgtggtcggtttgggtctgatccaaagatcattcagcaacgagagtgcgcgagtgacgaaccaccaatcactgtgaagctcgggcgagcgcattttgatcttggatggatccatccgacgaa

SEQ ID NO: 71 - DNA, 19736 bp, Agrobacterium rhizogenes
tggcaggatatattgtgatgtaaacagattagatatggacatgcgaagtcgttttaacgcatgctttatcgaatataaaatgtagatgggctaatgtggttttacgtcatgtgaataaaagttcagcattcgtttaataatatttcaatatcggtgtctagagacccgtggatttgtatagtcagcaccatgatatgaatctataaaatattgtatctccaattgcaattcaatcgatataagaaattaatacaagccgttcatatagtaaggttgccaatggcattcaataacgaccgtacagttgccgctatattaatctacgtgccatttcttaaataaagataggcgaatgactatcgaaaataaaacaattattaatgagtgaaaacgtattgcacaaataaagattcattatggttggctcaaattttggctctggtgctcgatgacgtcgagatgaggacagtagtgatcaacttggcggtcgataccttggttacgccactcccagagtgccatgtcgtcctccgagcggtctgagataacccagtcggcaattgctgctgcattgccgggcgttccccaaccacgacgaatatgctttcgttcatctaactcgcgtcgcactgccctcccagtcatgaagtcaaagccaaattctaccctctctccatttcccagctcagtcgagaaatcgtaacacctcgtggcagctgacagtttcagaaaggggcgtatccctcgaactccagggtcctctttcacatagttagcaaggcgtactgctgcataatctgcgttgaaggctctgatgactacaggatcctcggacaagcccaattgatcagggcgaaccctcgcgctcataatatgaattgcgacgacccttgcttcctgtcggagcatcgaatcaatccaagccttccctgcggcatagaggtcatcgactgcgatgtcatcaagatcgagtagctttgccaacctaggaagttcttgaggaaaaatcaccggcatgacagcaaccgtctctcgccagtcagttgccggactggcttccctaacgccatccacgaatgcctcaccgcttgcgtatttgaatgtgtaaaagagaaggaccactctttggcggtacttcggacgccggcttagccacgcggcaataatgtgggcctcaaactcacgaccatccaaaaatatagtcgcgcctggattgacctcgctggccttgtcgagaagaggttccaaaaagggaacggtgtctttcgtaatagtacttaaatctgtgagttcgccatgcgaaacctctcgaacgattatcggcgtatccctgacatcagctgaatgaaattctcggacgagtttgtcgggcaaagtggagacccgccacgtgttgaagtcgtgggaaacgatgggcacatcgtcgccggtgagtgcggcatcgagctcagagaggttccgcctgccaacctcaccgagagcagtcaacaacgaagtttcggtgcattcctgtatccctttacccagattatacatgccccggtgttcgataacttgaagaggcagtggctcctcaagatgttcaaggaggtggggtacagagtgccgggcgaggacctcatccaccgtgacaccaaccgggagatcccattcgagtttccactggggccagcatgtgcccgcgacggcgaaaggtttgcgctggcaaagaacccggctgctgcaggtggacctatccttacccatggcaatggggttttgctaaaaagtcaggcactttactgggcaattgatagggtgggattgcgttattaactgttctccagcgggaatctttatctttattgaaatgctaaagcacttagataaaatacagctgtaccgcaatataaaatagtaggataatgtaatatgtgtatcgagaatacgacaagctaatataatctagcgtcaaattgcaataatttaaatcaaaactactgatgaaataataaaagatggtcaatttttattggtaggagttgtcgaaagattcgacggacggccattacaatacataggtgcaagaagtaaaacaggaagggaaacggaaaacagtgctataaaaaagcgacagatcgcggcgatcactgactgcgatcgggaagaagctcgccaagttcaccgagaatagcagagagcgcatcctcatcgggtactacgaacacattcgtcccagagggctttgtttcagctgcgccaacccagaaagcaaggccattttccaagttgccgatggcggtcagcatgtctcgatcgttgctgccgtttccacaagcgatgtgaaggccgatcccgtgagagaggcccttgacgaaggtgaaatagcctttggattttccaactgtttcaacgggcactagatattgaccctctggcgcggcaaccaccttgaatttgcgagatgactggttgccgatgagcgaagaaagcatttctccggcttctttgtaagatttgtgagattcccacatttgacagccgtagaaatgccccatcggaatgttgcggattcccgggatgccaccaaatttgttctccatagccgcgtgaacggcttgccagttgggcagggagaaagaatcgaagcgatcatctttgtagatcgtgaccattccatcatttccctggaatccgatattttcaatggcgctgaaaactgaccttgcgatttcttcgcattcccgtgcggatgtgagcaattgataatggcccttgcaggcgatcctggtcaaattggcgatgatgttgatggcaggattaatatcccaacactggtgatttcgatcttgcttaaaggtggtaccatcgccgtcgaaggcgagcagggcccggagagatgaatcggcaagactgcgtcggacccgctccgcggcgtcgggaatgaggctgataagagacatatccaaaggtgtttgtgggtaacgggctgctcaatgaagccttaaatgcaacgcaacatatgtaaggatgagttgacttattggagagagaaataggaatgagctggccagccattatcaacgtggggccatgctgacaatgtttacgtgaaaggctcaactacctcgaagcagacctctatattcgttgactttattactgaacaagaagttgcttgccactcattttcttaaatcttgccctttctgcgcctcgctatcatgcccgccaacgacgcgacatgcgctgccgcgattgccttccccgagggcaactggaaggaagaacttgatgcgctccgcaccttgtgtgaccccgtcgaggtggttaaggtcgcagtcggcagaggtcttagcggcatatgtaatgttgttgcagcaatgaatcccacaaaggtgaggggcctcggcgatgtcatcgggcagatgccggctcttaatcaccgtattgctgccgccgccggcgaaactccggtgcgagaccttggaataggttaccagtgcgcaatctgccaccccgacatagccagtgcgatgttagccacttctgaggggatcagccacgttctccgtgaaaggattgagaaagaagttgaccgggacattggagaaggcgccaccgtctgcattttcgttcagccgagaatgagctccaagggctctccagtttctgtccatttcaccctccagtttgcgagatctggaactcttgtcgatgccagaatgatggagagttacaatttcatgaaaggcaatggcacagtgaccgcaccggatttgaaaagtcattggaagaagcacggtattgacaggccaggcccacgtccgcccacgtccaagtttgaactcctcttcgccgctgtccccgacaacagtaaacttgccgccaccgattttacccatctcggccctgtcgagcgtgataaggaactactcggcagcacggtattcgggattgccgctaagaaacctggtacgatcgtttatccgtgcgaaaaggttctctgtttggaggtcgacgtccaggcgcatcgcgccctggaagtacttcaccgccttggggaacaggcttatagcaatggccgtggcactagcttcggtcttcacaccggtccgtcctcttgccttaatctttccgccgccgcgctcgctacatttttcaaacgctcggatctctgttcccttccattgagtgatgcttttgtccttttctgcgaccacgccactggcgcctacagcgccaagaaagatggccttccgatcactgccttctcccccacgagcaccaatcagttcgaactcgtagagcctcaggtcgtcaaggcatatgttctcggacttttcgacgcgccgacgatggttacgccccgcgacaaaacgcgagccagcttctgcagccaatatgtacgtttccgtgaaccgcatccctgtgaagagttcaatgaaattggagttttgatcctcgatgctgctgctaaaatgctcgaacgttatgcaaaatttctagaagatggtggaagagatgatgatgaaatggcgaacataatagatgtatttgggttttgtcttaactagtggattgattgaaacaaaggagtccgagttgggattccctttcggtcttcgtcgtgcaacgatatcgtatgcgtacaggtatcacatttaacgttgctgcggcggaccgagcccgcttggaagcgattgttgcagctccaacttctgctcagaagcacgtgtggcgagcgaagatcatcttgatgagcagtgatggctcgggaacggtcgcgatcatggaggcaaccggtaaatccaaaacctgtgtctggcgctggcaggagcgcttcatgactgagggcgtcgatggccttttgcacgacaagagcagaccgcccggcattgcgccgcttgatggcgaactcgttgagcgtgtcgtcgcactgacgcttgagacgcctcaacaggaagcaacgcactggactgttcgtgcgatggccaaggccgttgggattgcagcctcttcggttgtgaagatctggcacgagcatggtcttgcgccgcatcgctggcgctctttcaaactgtcgaacgacaaggcctttgccgagaagcttcacgacgtcgttggcctctacgtctcgccaccggcccatgccattgtcctgtccgtcgatgagaagagccagatccaggcactcgatcggacgcaaccgggactccccttgaagaaagggcgcgccggcacaatgacccacgattacaagcgccacggcaccaccaccctatttgccgccctcaacatcctcgacggctcggtgatcggccgaaacatgcagcgtcaccggcatcaggagttcatccgttttctcaacgccatcgaggcggaactgccaaaggacaaggccgtccacgtcattctcgacaattacgcgacccataagcagccgaaggtccgcgcctggctggcaaggcatccgcgctggaccttccacttcgtcccaacatcatgttcatggctgaacgccgtcgagggattcttcgctaaattgacacgtcgacgtctgaagcacggtgtctttcattccgtcgttgacctccaggccaccatcaaccgcttcgtcagagagcataatcaggaaccaaagccgttcatctggagagcagatccagacgagatcattgcagccgtcaaacgtgggcaccaagcgttggaatcaatccactagcgtatgaacagtaataagaaaatcccgattgtgaatagtcccaatttcaaatgtgtccgtgtgtaatttgcgtgtcttcagttgaatttcctttaataatatcaaatattcaattgtgaaaagttgtattggttcaggttcaagctttccgaatttgttgaattttattccctgttttcaatttgttgacttgtttgggagacaccttttttgtgtttcgtgaacatgtcaccccttcggtatacattagcctacaaagtaaataacgttgataaatgtcactcatgttgtaataaaattgagcttattatgtataaccagaccctgtgttaatctaattacaaagaaattcatcattctcccaagcaatcctgagtagctgcgtgatggatcttccatatcagcgcccacgtttcaccccgtttgccgtcacccatccacgtagtggagtcaacctgaaccgtgcaatttctcaggcctttgtctgctatgatcagttctgcgaacggctcttgcgatatcagcaaagctggacggattgggtgttcgaccacggatttgcagaagccattgaagacgtggcgctggtgttccaggttgcaccttgccttcatggcccccgaataggcgcgctcgaagtgttgatacctcgtcgcacccaggtcttcatttatatgtcgaacaaccaattgcagcgctttgttgcacaccagtgcattgctcaacttggcgacgccgtgcttgcttgcatgatcccgccctacgcgagtgacctctcgctgcaggaaatggctcgggcgcacaacagattttgcccaggcagttacacgaggtccgcagacgtacagtgctttatcgccatccaactcagcagccgattcgttgaggagggcacatgtaacgtgcacgggcgaaatggcttaaaaagaacctgccgcttctttcgtcgccctgctgagttcttcagccgttatgacatcgttgccattgggccggtgctcttccatgatgaactggattgcccagcaaactgcaatgagcctctttcctgctttgacctgcggtacgactatcaggttttcctccaggagtgcgatgcccatgatggtgtggggcattatccggaaggcgcaccactacctagtgttgccatcgtaggaggcgggctgtctggccttgttgctgccacagaactacttggcgctggcgtcaaggaaatcactcttttcgataccgttgatgagatccgtagttttggggcatcgccgatgccaaacggcgacgctcaccaggccttgacgtcgttcggtgtcatgcctttctccgccaaccaactttgcctgtcatactatctggataagtttagaattccgtccagccttcgttttccttgtgccggcaacgaccacacagcactatatttccgccagaaacgctacgcatggcacgcggggcaagctccgccggggatatttcagcgggtacatgtcggatggaagacactactctaccaagggtgtgaacggaatggcaggagactgatggctccgatggatatctctttcatgttgaaagagcgtcgtcgtgatgaagcctcagaagcacggcagctttggctccgagagttcggaaaattcactttccatgccgttttggtcgagatcttcagctgtggtaattcgagtcctggtggcaaggcatggcaaacaccccatgatttcgaggctttcgggatactgaggttgggatacggccgagtttcgtcctattacaacgtgttgttttcaacgatcctggactggattatcaatggctacgaggaggaccagcatctttctattggtggggttcaacttttgcaggctctgatgcgcattgaaatattccagaaaagccatgcgaaagcacgactctgttttgatcccgtgcgtggaatagccaaggagggcgggagattgaaggtatgcttgaaacacggtcattcgcgtgtttttgaccaggtcatcattggcggcagtgctgaggccgctacagttgataacagactggccggggatgagacttccttcagctacaatatcgaacccgccgtcggaaactcgtctgccgctgtcaattcagcactcttcatggtcacgaagcaaaagttttgggttaactccggcatcccagcagtgatatggaccgatgggcttgtccgtgagctgtgttgcattgacatcgaatcgccagctggagagggccttgtcgtttttcactatgctttggatgactatctatcccggccgatcgagcatcatgacaagaagggacggtgcttggaattggtcagggagcttgctgctgcctttcctgaactggcttgtcacctggtcccagtcaacgaagactacgaacgatatgtcttcgacgaccacctaacggatggttttaagggagctttgtggagggaaaattctctggaaaaaggtcagtatatccaggatctgcctgggaataattttcctattggggatcacgggggagcctatctgattgaccgtgacgactgcgtcaccggagcctcgttcgaggagcaggtgaaggcgggcatcaaagcggcctgcgccgtcatccgcagcaccggcgggacgctctcttcactccaaccggtggactggaataaaaaatagaaatttcctgattaagttatagtcaatgtactattgcgtgttaatcccgtaggtatgcaagctgcaccggcagcatcataatttgatgttccatcaataaattaaggtgcccgttcattgtgtattacattatgtatgtttatcaaaaatataatcgaagtccattttaagtctgatattaattggaattccaaacgattccttgatgcctatcttcgctatgattgtatggtaataaagtctccacatctcccgaaaaatgctttcgtgatttacttgtctctcacgtgctttcgcatcttgacagccaaaagtgggcaacttgagaagagtattaactggccacgcaactcgagatattcccactaaccccaatgacgtcattgcactcgtcacgggtagcagccccacttgcctttgccactttattaattctttggcccactggccattaattggcacctacatatattagtggagaagataaagtgtcactatcgtttcctgttcaattttgaattttgcaaggatttcatgttgtcaactacacagcttgaaaggaaatccgcaatcaacggagaaacgtcaacatctcgacaaaaaaagaatgcttcatcattgcgtagactgcatattgaccgctcctttcggcgctgggcctgcttttactgttgcctagcgttcggacagccaccagagaatgggctatatagatcctttcatcaaaccaaaacattactaagatcatgctgtaacgcttcaatacggtgagtgtggttgtaggttcaattattactatttttgaagctgtgtatttccctttttctaatatgcacctatttcatgtttcagaatggaattagccggactaaacgtcgccggcatggcccagaccttcggagtattatcgctcgtctgttctaagcttgttaggcgtgcaaaggccaagaggaaggccaaacgggtatccccgggcgaacgcgaccatcttgctgagccagccaatctgagcaccactcctttggccatgacttcccaagcccgaccgggacgttcaacgacccgcgagttgctgcgaagggaccctttgtcgccggacgtgaaaattcagacctacgggattaatacgcatttcgaaacaaacctacgggattaatacgcacgtggctggcggtcttcgattcatttccacgccggagatgatatcgaatatgttctgttaagttaaaataagctgcgagccatggcgcgattgtcctgttttattaatatagtactttaacgtctctttagagcgtttgtgtaatgtcgtgaaaatgttttatgtcaaatgtactgttgaactataatattataagtccaggtgtgtcgttgttgttgatactgcaatatatgtgtagtagattagatagtcatatgagcatgtgctgtttttggcaaaattcagcagcaggatcaacacagaagaaaatatttagtacaagaaaataggtcaacacattacaacgtacgctacaactcccaaggttctgtgtcacagactgcgggagggtacatagaacttatgacaaactcatagataaaggttgcctgcagggggagttcaagtcggctttaggcttctttcttcaggtttactgcagcaggcttcatgacgccctcctcgccttcctgatcaggccccgagagtcgcagggttaggtctggctccggtgaggaggcggccggacgtgatatcccgagggcatttttggtgaattgtgtggtgccgcaagctacaacatcataggggcggttttcagtccctcgccgcagaaagaaggtgcaagctacctctctcccgtaaacgttggtcacttttaactccagcaagtgaatgaacaaggaacttgcgaaaatggcgatgaagcattctaaatcaggttcctccgtgcggctgtgcggccaagcaaggttgtgaacacggagcatctcctggagggcgagctcgctccgatatggttgaatcgttgtcgccagcacggcctccattccaaatgtaatggattgttccttcagcactttctgcatcttctcgcgagaaagatagacaaatacatgttggtcgttttctcgagccagatccggctgactaacaaacataggaggatgatagcagactttgttcttcaagagctcagctagttgtttaagtatatatatcggtggagagttttccttcaaatctagcactgcaagagcccatcgtttctggaaatgcaggaggggtttgctatagtcacggctatagattgcaaaagcaaatcggatcccctcgaataggtttatctggctccatgctggagtgagatctactggttgaaatcgtggaaggaatagcaatttgggatccattgtgatgtgagttggatagttacgaaaaaggcaagtgccagggccatttaaaatacggcgtcggaaactggcgccaatcagacacagtctctggtcgggaaagccagaggtagtttggcaacaatcacatcaagatcgatgcgcaagacacgggaggccttaaaatctggatcaagcgaaaatactgcatgcgtgatcgttcatgggttcatagtactgggtttgctttttcttgtcgtgttgtttggccttagcgaaaggatgtcaaaaaaggatgcccataattgggaggagtggggtaaagcttaaagttggcccgctattggatttcgcgaaagcggcattggcaaacgtgaagattgctgcattcaagatactttttctattttctggttaagatgtaaagtattgccacaatcatattaattactaacattgtatatgtaatatagtgcggaaattatctatgccaaaatgatgtattaataatagcaataataatatgtgttaatctttttcaatcgggaatacgtttaagcgattatcgtgttgaataaattattccaaaaggaaatacatggttttggagaacctgctatagatatatgccaaatttacactagtttagtgggtgcaaaactattatctctgtttctgagtttaataaaaaataaataagcagggcgaatagcagttagcctaagaaggaatggtggccatgtacgtgcttttaagagaccctataataaattgccagctgtgttgctttggtgccgacaggcctaacgtggggtttagcttgacaaagtagcgcctttccgcagcataaataaaggtaggcgggtgcgtcccattattaaaggaaaaagcaaaagctgagattccatagaccacaaaccaccattattggaggacagaacctattccctcacgtgggtcgctagctttaaacctaataagtaaaaacaattaaaagcaggcaggtgtcccttctatattcgcacaacgaggcgacgtggagcatcgacagccgcatccattaattaataaatttgtggacctatacctaactcaaatatttttattatttgctccaatacgctaagagctctggattataaatagtttggatgcttcgagttatgggtacaagcaacctgtttcctactttgttaacatggctgaagacgacctgtgttctctctttttcaagctcaaagtggaggatgtgacaagcagcgatgagctagctagacacatgaagaacgcctcaaatgagcgtaaacccttgatcgagccgggtgagaatcaatcgatggatattgacgaagaaggagggtcggtgggccacgggctgctgtacctctacgtcgactgcccgacgatgatgctctgcttctatggagggtccttgccttacaattggatgcaaggcgcactcctcaccaaccttcccccgtaccagcatgatgtgactctcgatgaggtcaatagagggctcaggcaagcatcaggttttttcggttacgcggatcctatgcggagcgcctacttcgctgcattttctttccctgggcgtgtcatcaagctgaatgagcagatggagctaacttcgacaaagggaaagtgtctgacattcgacctctatgccagcacccagcttaggttcgaacctggtgagttggtgaggcatggcgagtgcaagtttgcaatcggctaatggttagtcgatgggctgacgagtttgatgtcaggagaagctgagtgtgtcacttgtttccctttaagaagtattaatgtaataaaaatcaagatctggtttaataactggatacttgatttcatcgcgctttttttgaatatggagtgcaccccatttcaccggacaagtcggctagattgatttagccctgatgaactgccgaggggaagccatcttgagcgcggaatggggatggatttcgttgtagtcctcgatccatccgtcgcctgcggcgaacatcacccgtcagcaattcaacgtgtcgatagtcgttagacataagcctgtcctcaagcctgtgcttgagcctttctgcttatgccgactgtccggtcgaaatggggggcagttcagaataaatgtttgttgtcttgactttaagatatcctttgaaatttgcgttattcgtatttcgcttttggttatttccaaaagactttgctcagtaagatcaaacgtttgtatttctccgagccacaatatttgacctatatgcactggcccacgcgccgcaatagatgaaaattgccaaaattagctatcggtcttctgaaaagaagggccgacatgttttcatagaccatgcaaagtcatactacctgaaactgataaataacgacaaagaaagtagcctatttaaaagtcgctatagcatgaattcaacacaaggaaaccaaaagtcggaaggaagactttaatcccggattatttggacatgataggagctatggggcaacgtgtcattttcatgagtgttgaatgattttctgtagcaaatagaaaacgttttttaaaacgatgtggccttggagtaatcagcggaagaaatggtcatgctcagataatttccgttgctgacctcgcaaccaacccctttaaatacctctgctgcccatgcattttgccaagttaacctaaagtggcagctgaatggctcgttattgcagtggtggctctcaacggcttcatgtcgatgattttcgttggatcaaggagcccactcgactgaaggctcagcttattaatgtggtggagacctacaaggctgcacaaacagagacgttaaagtactatatatcatctgcaactgagcgtgtggctcatgtggaggcagccgaggtcaacaatgcggaaatggagctgcatcctgctgggttgaagtaccctctgtccttcgtctttacctccctggccgtggctacagcctgcaaggagaacaagcatctcttgtgcgaggagcatttggagggggacttgatatcgtgcgtcgttcctccctatcagacaaatgtctcactcgctgctttaagggagctccacaattccatttcgggaggagggtaccaggaacaagcagacatggattattttgtggcgatcatcccaaatgataatttcgactatcagagctgcgaaatcgacacacgaagttgcggtaaaggactttgcaagatttatagtagggaactgggagggcagcctctagcttatgacgccatactggcaatcggcaaggtgctgctgctggaatagatagtgggccgctgatccgagtttgattttgtcgtattatgttacgtgaactttttatcatgcatgtttcgcttatgctcccgagtgtcggccatgttgttgtgttaaaataaaaggctgatgttaagtcctattgtaaaatacctttatagattaaatatatatagtataacttctgtatgccgtcgatgagcggttatatgattgtaatctatacgttgttgcaatcaatcgtattacagtgagccgtgcttaatgaaataaacatcatgttaaatgtctatttattcaatcaacatgcgatgacaataatcaaaaggggaaacgtaataacattgcggtggatacagcgtttattgggagatccgcgggccgatacacttaaataacatagacagaatttgagagagcacgcaggttgtagccaagttgagcgacttgccggtagcacggaagctaagctcaggtgttacaaatagacaggcgtcgaggcgacgagcacgacgaccttgccggacattgcggtcgcagggggctcaaagcggttggcttgtaacggaccttgtgtttcttgttgtagctttcatcgagcataaccattgggacggttgctgaacaacggtaacgcacttttttcacgggagcgaggtagaagaacatatttccccgtcggcagccggcggtgagcatgccaattcctaagggattcaatggactcgtgcgaacggtgagcatgccgttctgaccgtcggtgcccaatcagcaggccactcccaacatgttttccaagtccttaaaaccagtctttatagcattgatctcccagcaatctttattgaagtcgattttaatattcaaaagaagattttagtggaaagggaatataatcgcgtggccgaagaagagccttcaaaaatcagaatccactaggataaacaataatatctgaaaagcattgaatttgggttaggcacgagaggctgacgcggatgccactcgattgctagtggaaggattcccttttttctagcgtatcgaattcaccgtttcactatatgttttcctgattggttgatctgcgggaccaccattgactgccactaatatcgaaagtgggtctgcttcgattatgatgctttgtgagaggttctcttcccaatgcatgcaagctggcagattcggatactctcaatagagatcttatttcgcgtctcaaaaagttcccagaaatcaacaaaggggagggcaggtcctttaaatacgttgcagctgtcctttaaaatagaagagaatttacagctggaggcacagaccactaaactgcgaaagtaagcatggcagatgagttggagcgtcaattggaagccatttctctcattacagtcctgggtccggatgtgaaggctgagcttgaggcggagctacgagactactgcgaagatctcgacttctggaaaagccacggtttaccggtggcggatctcgatcagactgtgactgtcgacaagcttctatacatgtatatggatcgggcaacagcagacctgtgtgtgaagaatcgctgcctcgtttgcaacagtggcaattcagccgcaaaagtaacctcgcttccaccataccttgcaggcgtgacaagcgccgaggcctatgagaaactcaactccattgttgatgggagtgtcgccccccaatctcgtgggcctccctgctattttgtggcgttcctgcccagcagctgtttcgagaaaaccagtgagatatcggtgcgcacagtggacggcgagtgtggccccttcgatgtctttacccggcagcgtcagccacaggatcagagtgatatgttttttaaatatgaaggagttgtatgtgctggaaagagtgtatttatgtaagaattatcttttatagcctgtgttacgtttgaacccggtccgcgcggtattgttttcaataaatggtatgtgcggaggatataattggtctttcattggtgtgatttacgtgtaacgcggataataataaagtaaattacaaaagagaaacgcataattttattccagaatgattgcgagaaacgatgaaaatacatgaaaatgcatattgtcgccagggaaggatggcgccgaaataaacgaaactgagccaatacagtgacttgccaagcgagtttgatcctaccaaattcgcgcaaattaatgcccgtgttccatcgggccagcgagtttattcaaaagagtttcgtacacgtgggcggcgacggcaacgtcaatgcttgctagccctaccggcgagaagttggccggccccttccatgccttgaggtcattcatcaaggcctcgtcatcgagaatttcggtgtagttcttgatcccatcgcgcttgccgtgttgggtcagtttcataccgcgcctagaatagtagagggcaacggcatcaacgttgcgggcttccatcgcaacaaggtcatcggcgacaattagaccatccgcagataggacatgctcaatgtaatccggcggcatgtcatcaataccgagtgacaaagtgactgcgttgggggcgatttcagcggcttcgaataccggttttccgtagttggtcgccatgatgacgaattgagaatatggcaaaaggctacgatcgccgacagcttcaaggctaaaggttacgcaatcacgtaacttttcgacgagctcgaaattggatttcttaccgcggctgagcactgctaccttacgaattctcttagcggcaccatagttaagtgagagaattacagcttcggcaacttttccagccccaaacaagaaaacgtcgatgtcctctctgccttgcaacagcaggtttacgcatgctagcgagaaccaacccgttcttccattagaaattgccacgccctctaccgacataaggagcgtcccggacaccttgtcgcgcaggaaaatatcggagtgctggagcggctttccggtagcggcgttggttggcgcgaagtggatgtctttggtgccggaatatcttccgaaatagccaatgagtgctccttcagtccatccaggaacattcttgttgaacgttaggtaagctttgacatgtccggcttttcctgcggcaaacacctcccaataggacttgagagcttcgtcaacaaatgctggtgtgatctggatatcgaggtttgatagtgcagattcagtccagtgtacctcgcaaagttgtttggccatctgccttgtaggtgcgaattttctctgctcaaattgttgaggttagcggatttgtaaacgcgtttatatgggctgcttggagggtacttttggattaatttttttctgccagcgcattctgacgcggcaccgctttggaaagtgcgctgtgggtccgcgttttctacaataatgtgccgatccggtcagaaagtatatggatgagttgtgccagcctcaccaacgtgctgcaggcccatcatgactacttcaatgttaatgggggtaatgaataaataggcgaaattgggttcacggtgggcccagggaatataatattgccgcagaggtagtcggatgccaaggcccgcaactaatagttcacgaacaaattcattgtagtgggcggccaactccaaaaccaattgccagttattgtattgcaatacatatatgagtattcggatacaactaatttcattaaataatattttaagtgtggacagaatagcgcctaataaatttgcgaatgttgtccaattgacgtttttataggtaactcgataaatcgtgcttttgtgatattctgatgcggacaatatacatttaaacataaagatataagttattgaggcatttatgtatattacaatagtggggtacatttttcacagatgctgtcacccatgaaatattggcaaaatactcttaaaatatgcaagaaactaaagaggatgcatgggttgggctgtaggtacatggatgcaaatgctgttttgcaataagtcatatagtctcgtctgttgagtgaggcccattcaatcagcaagtaggactgaggctgcatgatcgacatatttttgaaccacagttttggcaagtttttcatacaaatgcacggctacggccaaatcgtagcttgcaagtccaactgctgaaaagttagccggcccgttccaagaaattagcctttgcataaggactggatcgcggagaacttcagagtagttcctgatcccattgtccctgccgtgttttgttagctttaaatggcgtcttgaatagtgcagcgccaacgagtcgatattacgtgtttccatcgcatccatatcatctgccaccacgatgccactcagcttcaacacgtgatcaaaatagtcagctggcaattcgtcaattccaagcgtcaatgtaacggcattgtctgtgatctccttcatctcaaagacgggcttgtttgaattcgtcgccgtaattatgaacttggatttgctgagatatgctcgattgttaacagccttgagtgaaatcttgacttccggctgaagcctttgcaccaactcatggtttgactggttgcagcggctgagaatcgcgattcgttgaattcttccagatgctcccgaattgagggcgaggatgatggcctcggcaactttacctgctccgaataggaagacattgatctggcttcggccctgcaataggagattcaggcatgctagtgccagccaaccagttctcctctccgatatagccaccccatcaacagagaagagacgtctacctgtgaaacgattgcgaagcacaacgtcgatgtgagaagtcggttctttgtatctcgcgtttgacggattagaatggatgcttttcacacccgaatagtcgccgacgaaacccaccagagctccctccgtacagccctctcgatcaagtggaacgaagaccttgttgtggccgagccgcccttcagcaaagaggtgccaataatctttcaaggcatccgcgacgagttccggtgtaatgtatattccaaaagccgatagagattcctctgtccaacattgctcgtgtatttgatcggccatgtttgtgtttgatcagcctcctttcgaaaatttcttgagtttcgaataattctaaaatcgaaggacgattaatagtgccataccaagacaagaagggtaggtgggccatcaatccacaagcctagcacattttgctgtctgctcatgcaaggtatccaatggaagcctggattggttagccgaacttggtgggttcaattggagcgggcaggtcactttttgtctctcaaataactgaaactaagttttgttatttggtatgtgtttgtctgttctgccgaaggtgcccgaatttgcgcaaattcctttctaaaaaggcttacatctagcaaaaggtgagccctgtgcatcccagcatttggacaaagcgcgccaattcggacagcgactggctgcgttggaggctcggatctcaaagaatagaaaagagttatgatcatgttcagaaccgccaattttgtgcggtatgagctctttgatgaaagtaatggtttcaaaaaagcaacatcgtgggtgaaaggtacctacatatcttcacagacaataactactgttgctgtttgctgattgactgacaggatatatgttcctgtcatg

SEQ ID NO: 72 - DNA, 12323 bp, Agrobacterium rhizogenes
tggcaggatatatgccaacgtaaaaatgagggcaatcgattgtactgaatcggattttcaagggtctggccaaaactattccgtgggcacctggcacacgccctggagtccggcccgtttccagttgagggttgtctacgcttagatgagaaggaaagttgtccaagacgaatcccagtgtcctattaccaatagccggcgctagtttgatttcagaataaagagaaattcgtcacaccaaatattagaagcaatgtttgattgaccatcatacttaagatgaacattccaaacacagttataatacgcattattattgacacaatataaaattataatgttgatattccttgaaatataatattacaatagataaagtagaggaaattatgtcagaaatttggtttggctctgcttacgacagagtcggacgatgcctaaagtctattgcttcttctatcgctagtccaattgctaacagacgttcatccgagcttgcagagccatcgatttccatgccaataggcagaccgttggaactaagagaaacgggaagacttaggcccggcaggcccgcattactgctgggatctacattccgcacgaagattttaaaggtatcggtcattgagccattgtgaatcaccgatagatcatggccaattggcttggctgtcaacggagctgttgggaaaagaattgcatctagctgatgcgccttgaagtaactgtggtaggccgcttggagtctcggtctgaaaaaacgtcgcgccagacaatactcgcttttggaaataagattatccgagagttgtgcattgagaatacttgcaacatccggactgcgaatcgctctgacaacctcagaaaaggaaacaccctctacgaagttctgaatataatgttcaagggacaacggaaattcgtagatggcagtcggaaagctgaccccttcattgtgatgcgctaaatcaggaatatctgcttcaacaaaagtaacatctttgcgtgccagaactctgataatcgtctcggctgctaaggcgacatcgggctccaggtcgttgtaaaagtaagcggttggcaagcctatacgcagccccttcaggcggaccgtttgattaaccggcggtctcccgcaaatgataccgtcaagaagaatcacgtccggaacattctgtgcgataacgccaggggtgtcccgggtggggcttaccggaactattccgtccgttggatatcgccccacggtaggacgaaaccccaccacgccgcacaaggcggccggtaaacggaccgacgctcccgtgtcagttccgacgccgcccagcatcaatcggccggccaccgcggcggccacacccccacttgatccccctgggatgagactagggttccacgggtttcgtacggcgcctgtggcggagttgttgctcgtgatcccaaaagacaattcgtgcatgtttcccgaagcgccaggcagtgccccagccgcgagaagttgtcgtgcaactccggcaggcgtcttgggtttgtggttctgtaagcctggcgtaccagcggtcgcggcgaacctgcctgtcgcaatattcgctttaaagcataggggaacgccagctaggccaacaccggcacctccgtgttgatcgattttgctggcagtccaccgtaggtgcgcccagtcggtttccagaaaggcgtttaaggatcttgctgcttcacagcgggctattatcgtttcgattaactcaaagcacgagtattttctttccctgagacatttaagcgtctcggtgatcgaggagagggtcaccattttcgttgtgctgagggaactgagatagatctcgccagagaaacgttcaatgatttttgcttggagtgaaaaaggcaaataattatagaggaaggaagtcagaaatggctgcgcagtagggccacttgtataagtgccggtcgaacactgctggtggaaagtcaaaagcgtgaagtattagttgaactctgttactaaattgagataaatgggatattttattcgaaagtactgtttgagatctagcgacaataataatgtcatcttatgagattgcatggcaatatggatctaatatttggcataaatagatggtggttttgtctccacttttaaaccttcacagcgttaccctaacacctcttaattgcgtacactcctttcaaccgcatcaatggctggatcctccttcacattgccatcaactggctcagcgccccttgatatgatgcttatcgatgattcagatctgctgcaattgggtctccagcaggtattctcgaagcggtacacagagacaccgcagtcacgctacaaactgaccaggagggcttctccagacgtctcatctggcgaaggcaatgtgcatgcccttgcgttcatatatgtcaacgctgagacgttgcagatgatcaaaaacgctcgatcgctaaccgaagcgaacggcgtcaaagatcttgtcgccatcgacgttccgccatttcgaaacgacttctcaagagcgctactccttcaagtgatcaacttgttgggaaacaaccgaaatgccgatgacgatcttagtcacttcatagcagttgctctcccaaacagcgcccgctctaagatcctaaccacggcaccgttcgaaggaagcttgtcagaaaacttcagggggttcccgatcactcgtgaaggaaatgtggcatgtgaagtgctagcctatgggaataacttgatgcccaaggcctgctccgattcctttccaaccgtggatcttctttatgactatggcaagttcttcgagagttgcgcggccgatggacgtatcggttattttcctgaaggcgttagcaaacctaaagtggctataattggcgcaggcatttccgggctcgttgcagcgagcgaactacttcatgcaggggtagacgatgttacggtgtatgaggcgagtgatcggcttggaggaaagctatggtcacacggatttaagagtgctccaaatgtgatagccgagatgggggccatgcgttttccgcgaagtgaatcatgcttgttcttctatctcaaaaagcacggactggactccgttggtctgttcccgaatccgggaagtgtcgataccgcattgttctacaggggccgtcaatatatctggaaagcgggagaggagccaccggagctgtttcgtcgtgtgcaccatggatggcgcgcatttttgcaagatggctatctccatgatggagtcatgttggcgtcaccgttagcaattgttgacgccttgaagttagggcatctacagcaggcgcatggcttctggcaatcttggctcacatattttgagcgagagtctttctcttctggcatcgaaaaaatgttcttgggcaatcatcctccggggggtgaacaatggaattccctagatgacttggatcttttcaaagcgctgggtattggatccggcggattcggccctgtatttgaaagtgggtttatcgagatccttcgcttagtcgtcaacgggtatgaggataacgtgcggctgagttacgaaggaatttctgagctgcctcataggatcgcctcacaggtaattaacggcagatctattcgcgagcgtacaattcacgttcaagtcgagcagattgatagagaggaggataaaataaatatcaagatcaaaggaggaaaggttgaggtctatgatcgagtactggttacatccgggtttgcgaacatcgaaatgcgccatctcctgacatcaagcaacgcattcttccatgcagatgtaagccatgcaatagggaacagtcatatgactggtgcgtcaaaactgttcttgctgactaacgaaaaattctggctacaacatcatttgccatcgtgcatactcaccaccggcgttgcaaaggcagtttattgcttagactatgatccgcgagatccaagcggcaaaggactggtgttgataagctatacttgggaggatgactcacataagctcctagccgtccccgacaaaagagaaaggttcgcatcgctgcagcgcgatattgggagggcattcccagattttgccaagcacctaactcctgcagacgggaactatgatgataatatcgttcaacatgattggctgactgatccccacgctggcggagcgtttaaactgaaccgcagaggcaacgacgtatattcagaaaggcttttctttcagccctttgacgtaatgcatcccgcggacgataagggactttacttggccggttgtagctgttccttcaccggagggtgggttgatggtgccattcagaccgcatgcaacgctacgtgtgcgatcatttatggttcgggaggaaccctcaaagaaggtaatccactggcgcacgcttggaagcggtataggtatcaagcgtgataatgcaacagttagaataattagtttgccctagccggtattccttggtgttccaatagggttccgaagccaataggcgaaaaagctgacttttcagtcccttttattattcaattcgcttcggtccaagcataattgtaacgctacgtgatagaaaaatggaaattgacagattacttacttaaattaatataatctattaatatcgtcaagctaaaaacatgtaatacgtaaatatatggaaactttatgtctgaaaagaccacattattattgatcgtaatacactgaactggtcataacagggaaggctaactgcaacatatcctataaatactcagtgaaaatggccgctccccaatgttaagccatttttgcggtcgggctaagcgctcgtccgtgtctcccctggcccgagtgtcggctctccatcagcggcctcatcatctgtcgctgacaccggtggccccaatttcaaatcgaggaaagacgatgccctcgccggcaaacgtcgactggtggcattctccgcgaacttggtgaacccataagccacgacatcatagtcgcggtctcccgtcgcctggcggataagaaaggggcacaggacctcgtcgccatagatgtccactgctcgtgcctcgtaccaggaaacaaacaaagtgctggaaaaaatagcaacgaagcagtccatatctgattctttggtttggcggcgtcgccaagcaaggttgtggaccctagccatctctccgcgtgatagttcacttcgatatggctgaatagatgtcgcgactgccgcctccgtcccaaccaagaagcgccgattaaacagcagttcctgaatcttctcgcaggaaacatagatgaataaatattgctgcctctcaagcgctaggtccaatgggtcgtgcgctggggaatggtagcatacttttcgcgtaaggatttctgcattgattttgagttgattaactggatatctggcttcaaccatgttgagaaccctctcggcgaaagccttctgaaaacgcattatctcaccacgaaaggactggttgtagctatcgaaggcatcttgaagctctctgagcagtgttgtcgcatcttgggaatggcagaggttacgcggcggaaagtatggacgaattaggagccgcgagcccatagtattgctgaggtgggaatgtttttttgggccatgcagcatctatccaatttaagaacggcagaaatgacagccgcagaagcgcgctacagtacttggtcgggaaaacgacgttgtaagtctggtagcagtctaaatctggtcaagaaaagtgatatcacatcgacaaggcatgccgaaaacctggataatcagcaagtggctgtaaaggaaatatggtaaaattaggcgaatgaccgaatgtattgatgtcaggcatcgaactttgagccatttcctacattagggacacgtagtccgggctgaatgtgaaataaaagacctttatttgaacattgtacaggaatagtgttgaaaaagtgaaagatgtctcaagctccactaagtaaaggtgttgccgtttgatcgcggtataaagaatctgattccactttaagtttggtttattacgcggacgggatggtgattaaccgtgattgttgaatatctagttcactatttaaaaaatgttctgaagtagtatgcttactttcgtcaaagcgcaacgcgtccactaacagccgccttgctgccaccaagtcgtgactcacgagcacggaggtgtgtggccacgtaattctatagccgacgggagtcccttactaatatctcgagtcagcccggaattactatttcgtcgcgttgctgctcaagcattccaaggcgagcttatttagtgtgatgatgttacccgtcgtatctatcaaatatagctccgagataacttagggcaggttgatattaatgtttaaatagatagagatctcttattcagcgtcacaattttcttctgtgtcaaaaggatttctgttttcgtttatctagcgtcaaatagaacaaaacataagaacagaatgaggaacgtaataactgttattcaggtgttgataacgtgattgatgaaataatacatatataactgcaatatacggactgtcgcaggtcgagagatgacaccggaagtgatatcttaatgagccaaaggatagactcgcccagggtgagacctaggtccgccttagcacggcctccctagctatattggtaaattcaggcgcaagggctttccaaacggccagagctacggctctggacggtggagagactggttgatcgaaaagttggctgaccgctccaatttcccaattatggaggccggctcgttcaaaagacgtcaacgaagcagctcacccgtgctccaacgatgtgggtatgcatcgcacgcaggcttctattggcgagcatcagacccatatgcctgagagaaccggccggcttcatcttccgacgcaatggcttgtgtgttcacaagcgcttcttcggaccagctctgaattgccaagcaaggagagcggtataaatggtggaagttgagtgctggcgtgactcaccctcaagattagtggggcagttggcttttattgctattgggtcatttcctgggcgtgcacggaaacctaacaaaggtagtaatcgtgccagtagtggggcaggagaatattatgcatagctgtcagcatatttgttcgtgatttttaattggaaagtgaagcgaagattcccagtatgctgccaaattggatcgcactcacgcgcttggtgtgcttttaaaattcgggtgtctctaaagtgctttttcttatcgttgatgcgttcaataaatttaactcactttaggaaggctttctacaattatctcaccgcaaaaatgaaactccttaaatcgcagaatgaggccgcgtttgacatgttaaatatttaacttcacaaataatccgaacagcgtatgtataaaagtgacaaaacgaaataaaagaaagattaaagttggttattaaataacaattaaacgagcatggtcactggttccgcagcaccaagcacgaaaatggaaaatcgacctagtcctgatcttctgccgaagcattcgtcgatccatctcactgccgataaaaggagctccccttaggctgggtgacaattgtagtagtcaaactttcccatgtgtagcagcggatccagcattgttttcccggtggcctccgccagggcgggtgcccagggcttcaaaaaggcttcgcagatcattggtccgacaatcgctccaatttggggatcaatgccagacatatcaaagcccgttgtctcgatgacctgaaagcttatctcgccctctttgaatcgcatgtcgaagaaggtcttcacatccaacatttgaggtctgctggcatcatcagggattattagaatgtagtggctccgcttggctgtgcggacagtctccacaaaactgtggaagaaatcggcaccatccactgtatggatttcaaacccaaacctctcctgtaggacgcacagcccgaacgcatgaggaacaatccctgcgcatcccgaggcgatgaaatagagtggatgatcgtcggcgaatcttgcagcaaacgctattccaggctggacgcctttttccgcggccttaaacaaggcagctggaagtacctgcagagatgaaataagagccggaagcagtgcccagttctctctttcgttcagaataccaccaataagagacagcatcagcatatggatagcttggaaagcttgagttgttatccccgtggagaatgtttgatgaccgaaggacgcgagttttgagtttgcagatgccgtgaacacgactgacttgcaagccttgtccttcaagaacgcagcggcttcgacagtttccggcgtcatcccggactttgaagacaacaccacaagtgtcgtcggatcattcaccattgacgggttggcgcgcatgaggttcacgaaagttgcagaggcatatgcttcatatcggaggtttcgtccgacctggtcagtatatcgcttcaaactcctcgcgatcgccagacctgccccggcagagacgaacaggacgctgctgatactcgacgccgtggcgcgtccaaatttggcgactgtctcgagctgttggagcgtcgcgcgcaactgcccagacatctcaatcgcgctggtagatgaaggtgcatacagcaaatccattgtgctgtatcgagccggcgttctagcggaagttgaatggaagtgtggtttgtttcagaaaactggatgctgactggtccgtgtcagaggcgagctgacttatttatgccattcagcgggcggatcagacgtcgttgtcgttatttggggtaggtgcaccaaccttgctgagatattggttaccgtgtgggcccctctttgaatacatggaactgcgaggtgattggcatgtcaggttacgtcatcgcttacgcatcgccaaagtggcaaggaaataagagagaaaatagacttggtgtcatttagcaggacggatcagaagtcattgattgcggtttggtgcaccaactttgggcctacgacgttggtaccttaggctgcgtcagctatcacgcgctgcccgatattaaaaggcactcgccaaaatccggtcatctctatctcaacaaaccctctctacggtctttcattttacaatgcccctccctcgcgcgtaccttggtactgcccagccaccagccagtgtcaaggagttctacttcgtccgccatggtgcaaccgatctcaacgagaaagaaatgcacttgcaaggtgaaaaacattggggtgtgcagggcgccggcacgaacatcggtctcaatggaactggcaaacgccaagcggttctcgccggcaacgttctccgcaaacttcctatcggcagcgtcgtctgctcgccgcttttacgcgcaatacagacggctttgatcgccaatattggattcctctgctttgacatcgacgaggacctcaaagagcgggactttggcaagcatgagggtgggtatggaccactgaagatgttcgaggacaattaccccgattgtgaagacaccgaaatgttctctctccgcgtggcaaaggccctcactcatgccaagaacgaaaacacccttttcgtctcccatggaggcgtgctcagggttatcgctgcacttctcggcgtggaccttactaaggagcatacgaataacggacgtgttcttcatttccggcggggcttttcgcactggacggtagaaattcatcaaagcccggtgatcttggtcagcggttcaaaccgcggcgtcggcaaagccatcgccgaagacctgattgcgcacggctatcgcctcagcctcggcgcccggaaagtcaaagaccttgaagttgctttcggaccgcaagacgaatggctgcattatgcccgtttcgatgccgaggatcacggtaccatggcggcatgggtgaccgccgccgtcgagaaattcggaaggatcgacggtctcgttaacaatgctggctacggggaacctgtaaatcttgacaaacatgtggattatcagcggttccatctgcaatggtacattaactgcgtggctccgctgcgaatgacagagctctgcctacctcatctctatgagactggatctggccgaatcgtcaacatcaactctatgtcaggacagcgcgtgctgaatcctttggtcggttacaacatgacgaagcatgcactgggaggcctcaccaaaacaactcaacacgttggctgggaccgcggtgtgcgggcgatagacatctgccctggctttgttgccaccgatatgagtgcctggactgacctgattgcaagtaaggacatgatccagcccgaggacatagccaaactcgttcgcgaggcaattgagcgccccaaccgtgcgtacgtgccgagaagtgaagtgatgtgcattaaggaagcaacccgttgacatcgaatcgttcagagagcgtccgaagttttgtttttgcttatgtattgttgtcgtttctcaaaatatttcagcgcaatgtttttaatttcatatcgtgatgtttgtaatttgtttcattaattaatgtttgtgtagttcgaaaatagacaaacatatcaataatatattgattcttaatataaggtattaagaccacaacattgtataatttattgaattaataacgaagaacataacggggcttcaaagaattgtgacgtgcgcggatgtcggcgggctcaggcgacgaccgttcttctttcctcagatgttcctgccaagatcaaacggcgtgagcacctcatatccggtttcgctcacgaggaccgtgtcaccgaaacgcgcgccgccgatgccctggacatagacgccgggttcaatgctaaggacattacccacctctagtaccgtctgagagccggccttcagctcgattccgtcccaatcggagtaaccgatcccccgccccgtccgatgcaggaagggggcctcccaaccgctacgcttgattactgccactgcggccgcgtggatctcgcctgccgttactcctggacgcagcgctgccaaagcggctgactgagcttcccgcgcgacatcgataacctttcgcaagtttgcaggcaaaggcttcgaaccaatgggaaccggtcgatcgaaacaagctgcgtggccacggaacgtctggccgcaaaggcaaatctgcgcgatagcgccatcctgcatgatacggcccccgccggaaggatggcatcgggctgtgcgatcggccccgctgcccaccatattcaattggtgcggccagaaccgtggcagttcctcatcttcagctaacaactctccatttcgctcaatggcggcagtaacggaggcaagcgtgaccttccattcggggatgcccggagcgatagcattgcggcaggctagaaattgctcacgtacgatgtcacagctttgtctgatggcagcgatccccgccgcatccttgcaggcccagagctcttgcagcatcggtgttacgtccttgatgtgttctgcgccaagcgcctgcctgactaactcgacattggcgcccgaggtacaattgaagtccaaaccgatcaggcctgggtttggcgcgatccctctcgtatattgagcaagcgcatcttgatttgtcatgggagcagctatcggtccttcccattcaacccattccacagccacaggcgtcttgcagcgcgccgatatttcccgcgcttcactgcggggtgcgacgaaggccggtttgccgtactgttgcagaacaaaccagacaggcctgccgaccggcaaaccccataatccggcaaaatagttatggaaatccgggccggacaaggcaagaacatcgatgcctgcccgtttcatggcggtctgcgcaccttgcaggcgcgtttggtacacctcatcggagggcgaatcgttgacgcgcattgcgcagtttggtgtcggatcggggccccgaggcgattgggaatatattaaatttcgtaaggctttttgctaagttattgatttgctcgtccgaggttggggtagggtcctatttatgtccttcagcgggaagggcgatacttccgagaacatgatgtccacaacgagccacaatttccgctccaatgtcagcgttacattcggcgcttaccaaggaagcagccgcgttaataatgtgggcccccggctctttcacatgagcgagctgacacatagtttggacgccagttgttgctgcttgattatatataattttggccaagtgcagcgtttaataaatcgtgtgacaggatatatcttgtggtcagg

SEQ ID NO: 73 - DNA, 303 bp, Agrobacterium rhizogenes
atggaattagccggactaaacgtcgccggcatggcccagaccttcggagtattatcgctcgtctgttctaagcttgttaggcgtgcaaaggccaagaggaaggccaaacgggtatccccgggcgaacgcgaccatcttgctgagccagccaatctgagcaccactcctttggccatgacttcccaagcccgaccgggacgttcaacgacccgcgagttgctgcgaagggaccctttgtcgccggacgtgaaaattcagacctacgggattaatacgcatttcgaaacaaacctacgggattaa

SEQ ID NO: 74 - DNA, 780 bp, Agrobacterium rhizogenes
ttaggcttctttcttcaggtttactgcagcaggcttcatgacgccctcctcgccttcctgatcaggccccgagagtcgcagggttaggtctggctccggtgaggaggcggccggacgtgatatcccgagggcatttttggtgaattgtgtggtgccgcaagctacaacatcataggggcggttttcagtccctcgccgcagaaagaaggtgcaagctacctctctcccgtaaacgttggtcacttttaactccagcaagtgaatgaacaaggaacttgcgaaaatggcgatgaagcattctaaatcaggttcctccgtgcggctgtgcggccaagcaaggttgtgaacacggagcatctcctggagggcgagctcgctccgatatggttgaatcgttgtcgccagcacggcctccattccaaatgtaatggattgttccttcagcactttctgcatcttctcgcgagaaagatagacaaatacatgttggtcgttttctcgagccagatccggctgactaacaaacataggaggatgatagcagactttgttcttcaagagctcagctagttgtttaagtatatatatcggtggagagttttccttcaaatctagcactgcaagagcccatcgtttctggaaatgcaggaggggtttgctatagtcacggctatagattgcaaaagcaaatcggatcccctcgaataggtttatctggctccatgctggagtgagatctactggttgaaatcgtggaaggaatagcaatttgggatccat

SEQ ID NO: 75 - DNA, 543 bp, Agrobacterium rhizogenes
atggctgaagacgacctgtgttctctctttttcaagctcaaagtggaggatgtgacaagcagcgatgagctagctagacacatgaagaacgcctcaaatgagcgtaaacccttgatcgagccgggtgagaatcaatcgatggatattgacgaagaaggagggtcggtgggccacgggctgctgtacctctacgtcgactgcccgacgatgatgctctgcttctatggagggtccttgccttacaattggatgcaaggcgcactcctcaccaaccttcccccgtaccagcatgatgtgactctcgatgaggtcaatagagggctcaggcaagcatcaggttttttcggttacgcggatcctatgcggagcgcctacttcgctgcattttctttccctgggcgtgtcatcaagctgaatgagcagatggagctaacttcgacaaagggaaagtgtctgacattcgacctctatgccagcacccagcttaggttcgaacctggtgagttggtgaggcatggcgagtgcaagtttgcaatcggctaa

SEQ ID NO: 76 - DNA, 603 bp, Agrobacterium rhizogenes
atggctcgttattgcagtggtggctctcaacggcttcatgtcgatgattttcgttggatcaaggagcccactcgactgaaggctcagcttattaatgtggtggagacctacaaggctgcacaaacagagacgttaaagtactatatatcatctgcaactgagcgtgtggctcatgtggaggcagccgaggtcaacaatgcggaaatggagctgcatcctgctgggttgaagtaccctctgtccttcgtctttacctccctggccgtggctacagcctgcaaggagaacaagcatctcttgtgcgaggagcatttggagggggacttgatatcgtgcgtcgttcctccctatcagacaaatgtctcactcgctgctttaagggagctccacaattccatttcgggaggagggtaccaggaacaagcagacatggattattttgtggcgatcatcccaaatgataatttcgactatcagagctgcgaaatcgacacacgaagttgcggtaaaggactttgcaagatttatagtagggaactgggagggcagcctctagcttatgacgccatactggcaatcggcaaggtgctgctgctggaatag

SEQ ID NO: 77 - DNA, 825 bp, Agrobacterium rhizogenes
ctaagcgctcgtccgtgtctcccctggcccgagtgtcggctctccatcagcggcctcatcatctgtcgctgacaccggtggccccaatttcaaatcgaggaaagacgatgccctcgccggcaaacgtcgactggtggcattctccgcgaacttggtgaacccataagccacgacatcatagtcgcggtctcccgtcgcctggcggataagaaaggggcacaggacctcgtcgccatagatgtccactgctcgtgcctcgtaccaggaaacaaacaaagtgctggaaaaaatagcaacgaagcagtccatatctgattctttggtttggcggcgtcgccaagcaaggttgtggaccctagccatctctccgcgtgatagttcacttcgatatggctgaatagatgtcgcgactgccgcctccgtcccaaccaagaagcgccgattaaacagcagttcctgaatcttctcgcaggaaacatagatgaataaatattgctgcctctcaagcgctaggtccaatgggtcgtgcgctggggaatggtagcatacttttcgcgtaaggatttctgcattgattttgagttgattaactggatatctggcttcaaccatgttgagaaccctctcggcgaaagccttctgaaaacgcattatctcaccacgaaaggactggttgtagctatcgaaggcatcttgaagctctctgagcagtgttgtcgcatcttgggaatggcagaggttacgcggcggaaagtatggacgaattaggagccgcgagcccatagtattgctgaggtgggaatgtttttttgggccatgcagcat

SEQ ID NO: 78 - protein, 274 aa, Agrobacterium rhizogenes
MLHGPKKHSHLSNTMGSRLLIRPYFPPRNLCHSQDATTLLRELQDAFDSYNQSFRGEIMRFQKAFAERVLNMVEARYPVNQLKINAEILTRKVCYHSPAHDPLDLALERQQYLFIYVSCEKIQELLFNRRFLVGTEAAVATSIQPYRSELSRGEMARVHNLAWRRRQTKESDMDCFVAIFSSTLFVSWYEARAVDIYGDEVLCPFLIRQATGDRDYDVVAYGFTKFAENATSRRLPARASSFLDLKLGPPVSATDDEAADGEPTLGPGETRTSA

SEQ ID NO: 79 - protein, 100 aa, Agrobacterium rhizogenes
MELAGLNVAGMAQTFGVLSLVCSKLVRRAKAKRKAKRVSPGERDHLAEPANLSTTPLAMTSQARPGRSTTRELLRRDPLSPDVKIQTYGINTHFETNLRD

SEQ ID NO: 80 - protein, 259 aa, Agrobacterium rhizogenes
MDPKLLFLPRFQPVDLTPAWSQINLFEGIRFAFAIYSRDYSKPLLHFQKRWALAVLDLKENSPPIYILKQLAELLKNKVCYHPPMFVSQPDLARENDQHVFVYLSREKMQKVLKEQSITFGMEAVLATTIQPYRSELALQEMLRVHNLAWPHSRTEEPDLECFIAIFASSLFIHLLELKVTNVYGREVACTFFLRRGTENRPYDVVACGTTQFTKNALGISRPAASSPEPDLTLRLSGPDQEGEEGVMKPAAVNLKKEA

SEQ ID NO: 81 - protein, 180 aa, Agrobacterium rhizogenes
MAEDDLCSLFFKLKVEDVTSSDELARHMKNASNERKPLIEPGENQSMDIDEEGGSVGHGLLYLYVDCPTMMLCFYGGSLPYNWMQGALLTNLPPYQHDVTLDEVNRGLRQASGFFGYADPMRSAYFAAFSFPGRVIKLNEQMELTSTKGKCLTFDLYASTQLRFEPGELVRHGECKFAIG

SEQ ID NO: 82 - protein, 200 aa, Agrobacterium rhizogenes
MARYCSGGSQRLHVDDFRWIKEPTRLKAQLINVVETYKAAQTETLKYYISSATERVAHVEAAEVNNAEMELHPAGLKYPLSFVFTSLAVATACKENKHLLCEEHLEGDLISCVVPPYQTNVSLAALRELHNSISGGGYQEQADMDYFVAIIPNDNFDYQSCEIDTRSCGKGLCKIYSRELGGQPLAYDAILAIGKVLLLE
